(19) United States
(12) Patent Application Publication
(10) Pub. No.: US 2025/0382615 A1
(43) Pub. Date: Dec. 18, 2025

(54) NOVEL RNA THERAPEUTICS AND USES THEREOF

(71) Applicant: ELI LILLY AND COMPANY, Indianapolis, IN (US)

(72) Inventors: Marijean EGGEN, Brownsburg, IN (US); Patrick Joseph ANTONELLIS, Norwell, MA (US); Seth Andrew BAWEL, Brownsburg, IN (US); Thomas Patrick BEYER, Zionsville, IN (US); Christine Chih-Tao CHENG, Carmel, IN (US); Gregory Lawrence LACKNER, Indianapolis, IN (US); Rebecca Ruth MILES, Pendelton, IN (US); Jibo WANG, Carmel, IN (US); Takako WILSON, San Diego, CA (US)

(21) Appl. No.: 19/141,610

(22) PCT Filed: Dec. 22, 2023
(86) PCT No.: PCT/US2023/085647

§ 371 Date: Jun. 20, 2025

Related U.S. Application Data
(60) Provisional application No. 63/435,069, filed on Dec. 23, 2022.

(51) Int. Cl. C12N 15/113; A61P 9/06

(52) U.S. Cl. CPC C12N 15/113; A61P 9/06; C12N 2310/11; C12N 2310/14; C12N 2310/315; C12N 2310/321; C12N 2310/322; C12N 2310/351; C12N 2320/32

(57) ABSTRACT

The present invention relates to novel therapeutic compounds, known as RNAi agents, that decrease expression of the ANGPTL8 receptor (expressed by the ANGPTL8 gene), thereby decreasing expression of mRNA and protein expression. Such RNAi agents are useful in the treatment of diseases involving the regulation of ANGPTL8 expression and function, such as dyslipidemia, a cardiovascular disorder, or a cardiometabolic disorder.

### BACKGROUND

[0001] The present disclosure relates to novel RNAi agents designed to decrease the expression of ANGPTL8 in the liver, where the RNAi agents comprise delivery moieties conjugated to oligonucleotides optionally via a linker. The RNAi agents are useful in the treatment of diseases involving the regulation of ANGPTL8 expression.

[0002] Angiopoietin-like protein 8 (ANGPTL8) is mainly expressed in liver and adipose tissue and it plays an important role in triglyceride metabolism. ANGPTL8, together with ANGPTL3 or ANGPTL4, is thought to regulate triglyceride levels by inhibiting the enzymatic activity of lipoprotein lipase (LPL), which, when active, hydrolyzes triglycerides 10 and decreases circulating plasma triglycerides. Increased levels of ANGPTL8 are observed or associated with cardiovascular disease, diabetes, dyslipidemia (including high triglyceride levels), aberrant renal function, hypertension, nonalcoholic fatty liver disease such as nonalcoholic steatohepatitis (NASH), and obesity.

[0003] ANGPTL8 siRNAs and ASOs have been described, such as those disclosed in WO2020/104649 A2, but none have progressed for treatment in patients. Using the ANGPTL8 RNAi agents herein to decrease expression of ANGPTL8 can be employed, e.g., to treat cardiometabolic and related disorders such as dyslipidemia, in patients in need thereof.

### SUMMARY OF INVENTION

[0004] In one aspect, provided herein are RNAi agents for reducing ANGPTL8 gene expression, wherein the RNAi agent comprises a delivery moiety of Formula I conjugated to R, wherein R is a double stranded RNA (dsRNA) comprising an antisense strand and a sense strand:

[chemical structure]

[0005] wherein R is conjugated to connection point E of Formula I, optionally via a linker, wherein the sense strand and the antisense strand form a duplex region, and wherein the antisense strand comprises a region of complementarity to an ANGPTL8 mRNA target sequence of SEQ ID NO: 511, and wherein the sense and antisense strand each optionally comprise one or more modified nucleotides and optionally one or more modified internucleotide linkages. In some embodiments, Formula I is conjugated to the sense strand, optionally via a linker. In some embodiments, Formula I is conjugated to the 3′ terminal nucleotide of the sense strand, optionally via a linker.

[0006] In an embodiment, provided herein are RNAi agents for reducing ANGPTL8 gene expression, wherein the RNAi agent comprises a delivery moiety of Formula I conjugated to R, wherein R is a double stranded RNA (dsRNA) comprising an antisense strand and a sense strand:

[chemical structure]

wherein R is conjugated to connection point E of Formula I, optionally via a linker, wherein the sense strand and the antisense strand form a duplex region, and wherein the antisense strand comprises any one of SEQ ID NOs: 6, 7, 8, 9, 10, 11, 12, 13, 14, or 15, or a sequence having 90% sequence identity thereto, or an antisense strand sequence as set forth in Tables 3A, 3B, and 4 or a sequence having 90% sequence identity thereto, and wherein the sense and antisense strand each optionally comprise one or more modified nucleotides and optionally one or more modified internucleotide linkages. In some embodiments, Formula I is conjugated to the sense strand, optionally via a linker. In some embodiments, Formula I is conjugated to the 3′ terminal nucleotide of the sense strand, optionally via a linker.

[0007] In some embodiments, the antisense strand is 15 to 50 nucleotides in length. In some embodiments, the sense strand is 15 to 50 nucleotides in length. In some embodiments, the antisense strand is between 18 and 23 nucleotides in length. In some embodiments, the sense strand is between 18 and 21 nucleotides in length. In some embodiments, the antisense strand is 23 nucleotides in length and the sense strand is 21 nucleotides in length.

[0008] In some embodiments, the sense strand or the antisense strand comprises a sequence selected from Table 2A, Table 2B, Table 3A, Table 3B, or Table 4 disclosed herein. In some embodiments, the sense strand and the antisense strand comprise a sequence selected from Table 2A, Table 2B, Table 3A, Table 3B, or Table 4 disclosed herein.

[0009] In some embodiments, R is conjugated to Formula I via a linker. In further embodiments, the linker comprises a linker of Formula II having connection points A and B or the linker comprises Formula III having connection points C and D, and wherein:

[chemical structure]

[0010] a. Formula I, at connection point E, conjugated to Formula II at connection point A and Formula II is conjugated to a phosphate group at connection point B, and the phosphate group is further conjugated to R; or
[0011] b. Formula I, at connection point E, conjugated to Formula III at connection point C and Formula III is conjugated to a phosphate group at connection point D, and the phosphate group is further conjugated to R.

[0012] In another aspect, provided herein are pharmaceutical composition comprising the ANGPTL8 RNAi agent described herein and one or more pharmaceutically acceptable excipients.

[0013] In another aspect, provided herein are methods of treating cardiovascular disease, diabetes, dyslipidemia (including high triglyceride levels), aberrant renal function, hypertension, nonalcoholic fatty liver disease such as nonalcoholic steatohepatitis (NASH), or obesity in a patient in need thereof, comprising administering to the patient a ANGPTL8 RNAi agent or pharmaceutical composition thereof described herein.

[0014] In another aspect, provided herein are ANGPTL8 RNAi agent for use in a therapy. Also provided herein are uses of ANGPTL8 RNAi agent in the manufacture of a medicament for the treatment of cardiovascular disease, diabetes, dyslipidemia (including high triglyceride levels), aberrant renal function, hypertension, nonalcoholic fatty liver disease such as nonalcoholic steatohepatitis (NASH), or obesity.

### DETAILED DESCRIPTION

[0015] Such siRNAs may exhibit one or more of, e.g., as compared to other liver targeted siRNAs such as ANGPTL8 siRNAs comprising a different delivery ligand, a different sequence, a differently modified sequence, or as compared to treatment with a vehicle control: improved knockdown in the liver; improved tissue exposure, improved exposure in liver hepatocytes; an improved durable response; an improved pharmacokinetic profile; fewer off target effects, and/or an improved toxicity profile. Other embodiments of the ANGPTL8 RNAi agents herein may include one or more of fewer side effects as compared to statins or other standard of care; an improved toxicity profile; an improved safety profile; improved tolerability or compliance; and/or improved liver function tests. Still other siRNAs herein may have other benefits, e.g., in combination with any of the preceding or as a stand-alone benefit, including improved and/or simplified synthesis, synthetic processes with fewer degradation products; or any combination thereof.

[0016] The RNAi agents herein comprise a sense strand and an antisense strand, wherein each is an oligonucleotide. In some embodiments, the RNAi agent described herein also comprises a delivery moiety. As used herein, “nucleotide” means an organic compound having a nucleoside (a nucleobase such as, for example, adenine, cytosine, guanine, thymine, or uracil; and a pentose sugar such as, for example, ribose or 2′-deoxyribose) and a phosphate group. A “nucleotide” can serve as a monomeric unit of nucleic acid polymers such as deoxyribonucleic acid (DNA) and ribonucleic acid (RNA).

[0017] As used herein, “oligonucleotide” means a short nucleic acid compound (e.g., less than about 100 nucleotides in length). An oligonucleotide may be single-stranded (ss) or double stranded (ds). An oligonucleotide may or may not have duplex regions. As a set of non-limiting examples, an oligonucleotide may be, but is not limited to, a small interfering RNA (siRNA), microRNA (miRNA), short hairpin RNA (shRNA), Dicer substrate interfering RNA (DsiRNA), or antisense oligonucleotide (ASO).

[0018] As used herein, “ribonucleotide” means a nucleotide having a ribose as its pentose sugar, which contains a hydroxyl group at its 2′ position. A modified ribonucleotide is a ribonucleotide having one or more modifications or substitutions of atoms other than hydrogen at the 2′ position, including modifications or substitutions in or of the nucleobase, sugar, or phosphate group.

[0019] As used herein, “modified internucleotide linkage” means an internucleotide linkage having one or more chemical modifications when compared with a reference internucleotide linkage having a phosphodiester bond. A modified internucleotide linkage can be a non-naturally occurring linkage.

[0020] As used herein, “modified nucleotide” refers to a nucleotide having one or more chemical modifications when compared with a corresponding reference nucleotide selected from: adenine ribonucleotide, guanine ribonucleotide, cytosine ribonucleotide, uracil ribonucleotide, adenine deoxyribonucleotide, guanine deoxyribonucleotide, cytosine deoxyribonucleotide, and thymidine deoxyribonucleotide. A modified nucleotide can be a non-naturally occurring nucleotide. A modified nucleotide can have, for example, one or more chemical modification in its sugar, nucleobase, and/or phosphate group. Additionally, or alternatively, a modified nucleotide can have one or more chemical moieties conjugated to a corresponding reference nucleotide.

[0021] The term “percentage sequence identity” with respect to a reference nucleic acid sequence is defined as the percentage of nucleotides, nucleosides, or nucleobases in a candidate sequence that are identical with the nucleotides, nucleosides, or nucleobases in the reference nucleic acid sequence, after optimally aligning the sequences and introducing gaps or overhangs, if necessary, to achieve the maximum percent sequence identity. Alignment for purposes of determining percent nucleic acid sequence identity can be achieved in various ways that are within the skill in the art, for instance, using publicly available computer software programs, for example, those described in Current Protocols in Molecular Biology (Ausubel et al., eds., 1987, Supp. 30, section 7.7.18, Table 7.7.1), and including BLAST, BLAST-2, ALIGN, Clustal W2.0 or Clustal X2.0 or Megalign (DNASTAR) software. In one embodiment herein, sequence identity is calculated use Clustal W2.0 or Clustal X2.0. In another embodiment, sequence identity is calculated using Clustal W2.0. In another embodiment, sequence identity is calculated using Clustal X2.0. Those skilled in the art can determine appropriate parameters for measuring alignment, including any algorithms needed to achieve maximal alignment over the full length of the sequences being compared. Percentage of “sequence identity” can be determined by comparing two optimally aligned sequences over a comparison window, where the fragment of the nucleic acid sequence in the comparison window may comprise additions or deletions (e.g., gaps or overhangs) as compared to the reference sequence (which does not comprise additions or deletions) for optimal alignment of the two sequences. The percentage can be calculated by determining the number of positions at which the identical nucleotide, nucleoside, or nucleobase occurs in both sequences to yield the number of matched positions, dividing the number of matched positions by the total number of positions in the window of comparison, and multiplying the result by 100 to yield the percentage of sequence identity. The output is the percent identity of the subject sequence with respect to the query sequence. In some embodiments, percent sequence identity is the percent of nucleotide residues that are identical between two strands using the PID3 calculation, which is the number of identical nucleotide residues divided by the total number of nucleotides of the shortest of the two sequences, multiplied by 100. See, e.g., Raghava, G., Barton, G. J. Quantification of the variation in percentage identity for protein sequence alignments. BMC Bioinformatics 7, 415 (2006).

[0022] As used herein, “phosphate analog” means a chemical moiety that mimics the electrostatic and/or steric properties of a phosphate group. In some embodiments, a phosphate analog is positioned at the 5′ terminal nucleotide of an oligonucleotide in place of a 5′-phosphate. A 5′ phosphate analog can include a phosphatase-resistant linkage. Examples of phosphate analogs include, but are not limited to, 5′ phosphonates, such as 5′ methylene phosphonate (5′-MP) and 5′-(E)-vinylphosphonate (5′-VP). An oligonucleotide can have a phosphate analog at a 4′-carbon position of the sugar (referred to as a “4′-phosphate analog”) at a 5′-terminal nucleotide. An example of a 4′-phosphate analog is oxymethylphosphonate, in which the oxygen atom of the oxymethyl group is bound to the sugar moiety (e.g., at its 4′-carbon) or analog thereof. See, e g., Intl. Patent Application Publication No. WO 2018/045317. Other modifications have been developed for the 5′ end of oligonucleotides (see, e.g., Intl. Patent Application No. WO 2011/133871; U.S. Pat. No. 8,927,513; and Prakash et al. (2015) Nuc. Acids Res. 43:2993-3011).

[0023] As used herein, “region of complementarity” means a nucleotide sequence of a nucleic acid (e.g., a double stranded oligonucleotide) that is sufficiently complementary to an antiparallel nucleotide sequence to permit hybridization between the two sequences of nucleotides under appropriate hybridization conditions (e.g., in a phosphate buffer, in a cell, etc.). In some embodiments, an oligonucleotide herein includes a targeting sequence having a region of complementary to a mRNA target sequence.

[0024] As used herein, “duplex,” in reference to nucleic acids or oligonucleotides, such as a sense strand or an antisense strand means a structure formed through hydrogen bonds of complementary base pairing of two antiparallel sequences of nucleotides under suitable conditions to promote such a structure. A duplex may form despite not having full complementarity between the two strands, or when an abasic nucleotide is present. A Duplex No:, as shown herein, e.g., in Table 2A, Table 2B, Table 3A Table 3B, or Table 4 corresponds to a specific sense and antisense strand that comprise a given RNAi agent.

[0025] RNA interference is a specialized cellular process that utilizes RISC for degrading RNA in a sequence dependent manner. As used herein, “RNAi agent” comprises either (a) a double stranded oligonucleotide having a sense strand (passenger) and antisense strand (guide), in which the antisense strand or part of the antisense strand is used by the Argonaute 2 (Ago2) endonuclease in the cleavage of a target mRNA or (b) a single stranded oligonucleotide having a single antisense strand, where that antisense strand (or part of that antisense strand) is used by the Ago2 endonuclease in the cleavage of a target mRNA. In some embodiments, RNAi agent comprises a delivery moiety.

[0026] As used herein, a bond illustrated as [symbol] indicates a connection point as described therein. For example, if a generic variable, e.g., X, is stated to be attached at the connection point E as shown below, this is intended to show X is bonded to the atom of the connection point (see the scheme below).

[chemical structure]

[0027] As used herein, “treatment” or “treating” refers to all processes wherein there may be a slowing, controlling, delaying, or stopping of the progression of the disorders or disease disclosed herein, or ameliorating disorder or disease symptoms, and need not indicate a total elimination of all disorder or disease symptoms. Treatment includes administration of an RNAi agent or pharmaceutical composition thereof for treatment of a disease or condition in a mammal including a human.

[0028] An “effective amount” refers to an amount necessary (for periods of time and for the means of administration) to achieve the desired therapeutic result. An effective amount of a RNAi agent may vary according to factors such as the disease state, age, sex, and weight of the individual, and the ability of the RNAi agent to elicit a desired response in the individual. An effective amount is also one in which any toxic or detrimental effects of the RNAi agent are outweighed by the therapeutically beneficial effects.

[0029] Provided herein are RNAi agents for reducing ANGPTL8 gene expression, wherein the RNAi agent comprises a delivery moiety of Formula I conjugated to R, wherein R is a double stranded RNA (dsRNA) comprising an antisense strand and a sense strand:

[chemical structure]

wherein R is conjugated to connection point E of Formula I, optionally via a linker, wherein the sense strand and the antisense strand form a duplex region, and wherein the antisense strand comprises a region of complementarity to a ANGPTL8 mRNA target sequence of SEQ ID NO: 511, and wherein the sense and antisense strand each optionally comprise one or more modified nucleotides and one or more modified internucleotide linkages.

[0030] Also provided here are RNAi agents for reducing ANGPTL8 gene expression, wherein the RNAi agent comprises a delivery moiety of Formula Ia conjugated to R, wherein R comprises an antisense strand and a sense strand:

[chemical structure]

[0031] wherein R is optionally conjugated to Formula Ia via a linker, wherein the sense strand and the antisense strand form a duplex region, and wherein the antisense strand comprises a region of complementarity to a ANGPTL8 mRNA target sequence of SEQ ID NO: 511, and wherein the sense and antisense strand each optionally comprise one or more modified nucleotides and one or more modified internucleotide linkages. Disclosed herein are RNAi agents for reducing ANGPTL8 gene expression, wherein the RNAi agents comprise a sense strand and an antisense strand, wherein the sense strand and the antisense strand form a duplex region, and wherein the antisense strand comprises at least 15 nucleotides as set forth in an antisense strand sequence disclosed herein, and wherein the sense strand and/or the antisense strand each optionally comprise one or more modified nucleotides and/or modified internucleotide linkages. In further embodiments, the antisense strand comprises at least 15 nucleotides of an antisense strand sequence in Table 2A, Table 2B, Table 3A, Table 3B, or Table 4. In further embodiments, the RNAi agent reduces ANGPTL8 gene expression by about 50% or greater in a cell expressing ANGPTL8, as compared to a control. In further embodiments, the RNAi agent reduces ANGPTL8 gene expression by reducing the level of ANGPTL8 mRNA transcript, the level of ANGPTL8 protein, or both.

[0032] In further embodiments, the antisense strand is 15 to 25 nucleotides in length, and/or the sense strand is 15 to 25 nucleotides in length. In further embodiments, the antisense strand is between 18 and 23 nucleotides in length. In further embodiments, the sense strand is between 18 and 21 nucleotides in length.

[0033] In further embodiments, the RNAi agent comprises at least 18 contiguous nucleotides of an antisense strand sequence set forth in Table 2A, Table 2B, Table 3A, Table 3B, or Table 4.

[0034] In further embodiments, the antisense strand of the RNAi agent is 23 nucleotides in length. In still further embodiments, the sense strand is 21 nucleotides in length. In another embodiment, the sense and antisense strand comprise a sequence selected from the sequences set forth in Table 2A, Table 2B, Table 3A, Table 3B, or Table 4.

[0035] The sense strand and the antisense strand of the RNAi agents disclosed herein do not require full complementarity. Accordingly, in the RNAi agents disclosed herein, the duplex region between the sense strand and the antisense strand comprises 0, 1, 2, or 3 mismatches between the sense strand and the antisense strand. In further embodiments, the duplex region between the sense strand and the antisense strand consists of 0, 1, 2, or 3 mismatches between the sense strand and the antisense strand.

[0036] In further embodiments, the sense strand and the antisense strand each independently comprise one or more modified nucleotides, such as 2′ fluoro modified nucleotides or 2′-O-methyl modified nucleotides. In still further embodiments of the RNAi agents disclosed herein, each nucleotide of the sense strand and each nucleotide of the antisense strand is a modified nucleotide. In further embodiments, each nucleotide is a 2′ fluoro modified nucleotide or a 2′-O-methyl modified nucleotide.

[0037] In further embodiments, the antisense strand has a sequence as set forth in an antisense strand sequence in Table 2A, Table 2B, or Table 4, or a sequence having at least 90% sequence identity thereto, or an antisense strand sequence in Table 3A or Table 3B, or a sequence having at least 90% sequence identity thereto. In other embodiments, the antisense strand sequence or the sense strand sequence in Table 2A or Table 2B or Table 3A or Table 3B or Table 4 is independently a sequence that is at least 80, 81, 82, 83, 84, 85, 86, 87, 88, 89, 90, 91, 92, 93, 94, 95, 96, 97, 98, or 99 percent identical thereto.

[0038] In further embodiments of the RNAi agents disclosed herein, the antisense strand is 23 nucleotides in length, each nucleotide of the antisense strand is a modified nucleotide, and the 2′ fluoro modified nucleotides may appear at different positions than is shown in the sequences in Table 2A, Table 2B, Table 3A, Table 3B, or Table 4. In an embodiment, the 2′ Fluoro modified nucleotides are present at
[0039] a. Positions 2, 3, 7, 14, and 16 from the 5′ end of the antisense strand; or
[0040] b. Positions 2, 5, 7, 14, and 16 from the 5′ end of the antisense strand; or
[0041] c. Positions 2, 3, 8, 14, and 16 from the 5′ end of the antisense strand; or
[0042] d. Positions 2, 5, 8, 14, and 16 from the 5′ end of the antisense strand; or
[0043] e. Positions 2, 6, 14, and 16 from the 5′ end of the antisense strand.
   In further embodiments, the nucleotides that are not 2′ fluoro modified nucleotides are 2′-O-methyl modified nucleotides.

[0044] In further embodiments of the RNAi agents disclosed herein, the sense strand and antisense strand each independently comprise one or more modified internucleotide linkages, and each modified internucleotide linkage is a phosphorothioate linkage. In further embodiments, the sense strand and antisense strand each independently comprise four phosphorothioate linkages. In still further embodiments, the two terminal nucleotides at each of the 5′ and 3′ ends of each of the sense and antisense strand are phosphorothioate linkages.

[0045] In other embodiments, the 5′ nucleotide of the antisense strand comprises a naturally occurring OH group, or is modified to contain a phosphate group or a phosphate analog. As used herein, “phosphate analog” means a chemical moiety that mimics the electrostatic and/or steric properties of a phosphate group. In some embodiments, a phosphate analog is positioned at the 5′ terminal nucleotide of an oligonucleotide in place of a 5′-phosphate. A 5′ phosphate analog can include a phosphatase-resistant linkage. Examples of phosphate analogs include, but are not limited to, 5′ phosphonates, such as 5′ methylene phosphonate (5′-MP) and 5′-(E)-vinylphosphonate (5′-VP). An oligonucleotide can have a phosphate analog at a 4′-carbon position of the sugar (referred to as a “4′-phosphate analog”) at a 5′-terminal nucleotide. An example of a 4′-phosphate analog is oxymethylphosphonate, in which the oxygen atom of the oxymethyl group is bound to the sugar moiety (e.g., at its 4′-carbon) or analog thereof. See, e g., Intl. Patent Application Publication No. WO 2018/045317. Other modifications have been developed for the 5′ end of oligonucleotides (see, e.g., Intl. Patent Application No. WO 2011/133871; U.S. Pat. No. 8,927,513; and Prakash et al. (2015) Nuc. Acids Res. 43:2993-3011).

[0046] In further embodiments, the 5′ terminal nucleotide of the antisense strand may comprise a further modification, wherein the 5′ terminal nucleotide contains as a 5′ a vinyl phosphonate, a phosphate, or a hydroxyl group. In other embodiments, the phosphate group listed at the 5′ end of the recited SEQ ID NO: is removed and replaced with an OH. In other embodiments, the phosphate group listed at the 5′ end of the recited SEQ ID NO: is replaced with a 5′ vinylphosphonate.

[0047] In further embodiments, 1, 2, or 3 mismatches are introduced into the sense strand sequence of Table 2A Table 2B, Table 3A, Table 3B. In further embodiments, 1, 2, or both terminal nucleotides of 5′ end of the antisense strand are changed.

[0048] In some embodiments of the RNAi agents herein, the antisense strand comprises a first nucleic acid sequence that has at least 90% sequence identity to an antisense sequence corresponding to a Duplex NO: in Table 2A, Table 2B, Table 3A, Table 3B, or Table 4 and the sense strand comprises a second nucleic acid sequence that has at least 90% sequence identity to a sense sequence corresponding to the same Duplex No: in Table 2A, Table 2B, Table 3A, Table 3B, or Table 4. For example, in one embodiment, the antisense strand comprises a first nucleic acid sequence that has at least 90% sequence identity to an antisense sequence corresponding to a Duplex NO: 1 in Table 2A, that is, a first nucleic acid sequence that has at least 90% sequence identity to SEQ ID NO:6, and the sense strand comprises a second nucleic acid sequence that has at least 90% sequence identity to a sense sequence corresponding to Duplex No: 1 in Table 2A, that is, SEQ ID NO: 1. In further embodiments, the 5′ phosphate of the antisense strand is further modified/replaced, and is a 5′ vinylphosphonate or an OH group.

[0049] In further embodiments, the 5′ terminal nucleotide of the antisense strand is substituted such that the final sequence contains a vinylphosphonate, a phosphate group, or an OH group.

[0050] In other embodiments disclosed herein are RNAi agents having a delivery moiety of Formula I conjugated to R:

[chemical structure]

wherein R is a dsRNA comprises a sense strand and an antisense strand, wherein the antisense strand comprises at least 15 contiguous nucleotides that have complementarity to ANGPTL8 mRNA target sequence of SEQ ID NO: 511, and wherein the sense strand and the antisense strand form a region of complementarity of at least 15 nucleotides, and wherein the sense strand and antisense strand are each independently 18 to 23 nucleotides in length, and optionally wherein the sense strand and antisense strand each independently comprise one or more modified nucleotides, and optionally wherein the sense strand and the antisense strand each independently comprise one or more modified internucleotide linkages, and wherein R is optionally conjugated to Formula I via a linker. In further embodiments, the sense or the antisense strand is selected from a Table 2A, Table 2B, Table 3A, Table 3B, or Table 4 disclosed herein. In other embodiments, the antisense or antisense strand of the RNAi agent has an antisense strand sequence and/or a sense strand sequence of at least 80%, 81%, 82%, 83%, 84%, 85%, 86%, 87%, 88%, 89%, 90%, 91%, 92%, 93%, 94%, 95%, 96%, 97%, 98%, or 99% sequence identity to the corresponding sequence selected from a Table 2A, Table 2B, Table 3A, Table 3B, or Table 4 herein.

[0051] In other embodiments, the RNAi agent disclosed herein comprises a linker. In other further embodiments R is conjugated to Formula I via a linker. In further embodiments, the linker comprises a linker of Formula II having connection points A and B or the linker comprises Formula III having connection points C and D, and wherein:

[chemical structure]

[0052] a. the RNAi agent comprises Formula I, at connection point E, conjugated to Formula II at connection point A and Formula II is conjugated to a phosphate group at connection point B, and the phosphate group is conjugated to R; or
[0053] b. the RNAi agent comprises Formula I, at connection point E, conjugated to Formula III at connection point C and Formula III is conjugated to a phosphate group at connection point D, and the phosphate group is further conjugated to R.

[0054] In other embodiments wherein the RNAi agent comprises a linker, R is conjugated to Formula I via a linker, and the linker is a linker comprising Formula III having connection points C and D:

[chemical structure]

and wherein the RNAi agent comprises Formula I conjugated to Formula III at connection point C and Formula III is conjugated to a phosphate group at connection point D, and the phosphate group is further conjugated to R.

[0055] The sense strand and antisense strand of RNAi agent can be synthesized using any nucleic acid polymerization methods known in the art, for example, solid-phase synthesis by employing phosphoramidite chemistry methodology (e.g., Current Protocols in Nucleic Acid Chemistry, Beaucage, S. L. et al. (Edrs.), John Wiley & Sons, Inc., New York, NY, USA), H-phosphonate, phosphotriester chemistry, or enzymatic synthesis. Automated commercial synthesizers can be used, for example, MerMade™ 12 from LGC Biosearch Technologies, or other synthesizers from BioAutomation or Applied Biosystems. Phosphorothioate linkages can be introduced using a sulfurizing reagent such as phenylacetyl disulfide or DDTT (((dimethylaminomethylidene) amino)-3H-1,2,4-dithiazaoline-3-thione). It is well known to use similar techniques and commercially available modified amidites and controlled-pore glass (CPG) products to synthesize modified oligonucleotides.

[0056] In still other embodiments, the RNAi agent is capable of decreasing expression of the ANGPTL8 gene in a liver cell. In other embodiments, the RNAi agents disclosed herein are for use in therapy. In further embodiments, the use is for the treatment of dyslipidemia such as high plasma triglyceride levels. In other embodiments, the RNAi agents disclosed herein are for use in the treatment of cardiovascular disease. In other embodiments herein, the RNAi agents are for use in preventing a cardiovascular event. In further embodiments, the cardiovascular event is myocardial infarction. In other embodiments, the use is for decreasing hospitalizations related to cardiovascular disease or events. In other embodiments, the use is for treating non-alcoholic fatty liver disease (NAFLD). In further embodiments, wherein the NAFLD is non-alcoholic steatohepatitis (NASH). In other embodiments, the use is for decreasing inhibition of lipoprotein lipase (LPL). In further embodiments, the use is for increasing catabolism of triglyceride rich lipoproteins. In other embodiments, the RNAi agents are for use in treating a liver disease in a patient that would benefit from decreasing expression levels of ANGPTL8. In other embodiments, the use is for treatment of any of the preceding, after statin use failed to control one or more symptoms, e.g. failed to reduce one or more of elevated total-C, LDL-C, apo B, and/or failed to increase HDLC. In other embodiments, the use is for the treatment of any of the preceding, in patients that are statin intolerant; in further embodiments, the use is for lowering LDL-C in patients that are statin intolerant. In further embodiments, the use is for any of the preceding uses, after alteration of diet failed to control one or more symptoms. In other further embodiments, the use is for any of the preceding uses, as an adjunct therapy to diet.

[0057] The RNAi agents may be formulated into pharmaceutical compositions. Accordingly, disclosed herein are pharmaceutical compositions comprising the RNAi agent disclosed herein, and one or more pharmaceutically acceptable excipients. Pharmaceutical compositions can be prepared by methods well known in the art (e.g., Remington: The Science and Practice of Pharmacy, 23rd edition (2020), A. Loyd et al., Academic Press).

[0058] In other embodiment are uses of the RNAi agents herein for the manufacture of a medicament for the treatment of dyslipidemia or any of the uses recited in the preceding paragraph.

[0059] In other embodiments are methods of treating dyslipidemia, in patients in need thereof, comprising administering an RNAi agent disclosed herein, or a pharmaceutical composition thereof, to the patient. In other embodiments are methods of treating dyslipidemia, or any of the uses recited above, in patients in need thereof, or a pharmaceutical composition thereof. In other embodiments are methods of treating a patient unable to achieve lipid levels following statin and/or diet therapy, comprising administering to the patient an RNAi agent disclosed herein, or a pharmaceutical composition thereof.

[0060] The RNAi agent can be administered to the patient intravenously or subcutaneously.

[0061] RNAi dosage regimens may be adjusted to provide the optimum desired response (e.g., a therapeutic response). For example, a single bolus may be administered, several divided doses may be administered over time, or the dose may be proportionally reduced or increased as indicated by the exigencies of the therapeutic situation.

[0062] Dosage values may vary with the type and severity of the condition to be alleviated. It is further understood that for any particular subject, specific dosage regimens should be adjusted over time according to the individual need and the professional judgment of the person administering or supervising the administration of the compositions.

[0063] In other embodiments are methods of decreasing ANGPTL8 expression in a cell, comprising contacting the cell with an RNAi agent disclosed herein, and incubating the cell for a time sufficient for decreasing the level of ANGPTL8 mRNA by at least 50% as compared to an untreated or control treated cell.

[0064] Certain abbreviations are defined as follows: “1,2-DCE” refers to 1,2-dichloroethane; “DCM” refers to dichloromethane; “DIEA” refers to N,N-diisopropylethylamine; “DMF” refers to N,N-dimethylformamide; “DMAP” refers to 4-dimethylaminopyridine; “DMTCl” refers to 4,4′-dimethoxytrityl chloride; “DPP4” refers to dipeptidyl peptidase; “EDC” refers to 1-ethyl-3-(3-dimethylaminopropyl) carbodiimide; “EtOAc” refers to ethyl acetate; “GalNAc” refers to N-acetylgalactosamine; “HATU” refers to 1-[bis(dimethylamino)methylene]-1H-1,2,3-triazolo[4,5-b]pyridinium 3-oxide hexafluorophosphate; “HBTU” refers to O-(benzotriazol-1-yl)-N,N,N′,N′-tetramethyluronium hexafluorophosphate; “HOBt” refers to 1-hydroxybenzotriazole hydrate; “HPRT” refers to hypoxanthine-guanine phosphoribosyltransferase; “IPA” refers to isopropanol and isopropyl alcohol; “LDHA” refers to lactate dehydrogenase-A; “MeCN” refers to acetonitrile; “MeOH” refers to methanol and methyl alcohol; “MWCO” refers to molecular weight cut-off; “NHS” refers to N-hydroxysuccinimide; “OD” refers to optical density; “PBS” refers to phosphate-buffered saline; “PhSiH₃” refers to phenylsilane; “PTS” refers to portable endotoxin testing system; “siRNA” refers to small interfering ribonucleic acid; “TEA” refers to triethylamine; “TFA” refers to trifluoroacetic acid; “THF” refers to tetrahydrofuran; “TLC” refers to thin line chromatography; and “TMP” refers to 2,2,6,6-tetramethylpiperidine.

[0065] A delivery moiety comprising Formula I may be made by the following nonlimiting synthetic steps and schemes.

[chemical structure]

[0066] Scheme 1, step A, depicts the cyclization of compound (1) using trimethyl trifluoromethanesulfonate in a solvent such as 1,2-DCE to give compound (2). Step B shows the addition of hex-5-en-1-ol to compound (2) using trimethylsilyl trifluoromethanesulfonate in a solvent such as 1,2-DCE to give compound (3). The oxidation of compound (3) using an appropriate oxidizing agent such as sodium periodate with a catalyst such as ruthenium (III) chloride to give compound (4) is shown in step C.

[chemical structure]

[chemical structure]

[0067] Scheme 2, step A, shows an amide coupling between compound (5) and tert-butyl N-[2-[2-(tert-butoxycarbonylamino)ethylamino]ethyl]carbamate using HBTU and HOBt with an appropriate base such as DIEA in a solvent such as DMF to give compound (6). Step B depicts a basic hydrolysis of compound (6) using a base such as aqueous NaOH in a THF and MeOH solvent system to give compound (7). Step C shows an amide coupling between compound (7) and allyl 11-aminoundecanoate hydrochloride using HATU with an appropriate base such as DIEA in a solvent such as DMF to give compound (8). Step D shows the acidic deprotection of compound (8) with TFA in a solvent such as DCM to give compound (9). The amide coupling between compound (9) and compound (4) using EDC and HOBt in a solvent such as DCM to give compound (10) is shown in step E. Step F shows the deprotection of compound (10) with tetrakis(triphenylphosphine) palladium and PhSiH₃ in a solvent such as DCM to give compound (11). Step F depicts the coupling of compound (11) with NHS using EDC in a solvent such as DCM to give compound (12).

[chemical structure]

[chemical structure]

[0068] Scheme 3, steps A-C are essentially analogous to those of scheme 2, steps C-E beginning with compound (7) to give compounds (13), (14), and (15). Step D depicts the hydrogenation of compound (15) using palladium on carbon in a solvent such as MeOH to give compound (16). Step E is essentially analogous to the preparation of scheme 2, step G to give compound (17).

[chemical structure]

[0069] Scheme 4, steps A-I, are composed of a series of amide couplings and deprotections using methods essentially analogous to those found in schemes 2 and 3 beginning with compound (18) to give compound (27).

[chemical structure]

[0070] Scheme 5, steps A-C depict methods essentially analogous to those found in scheme 4, steps G-I beginning with compound (24) to give compound (30).

[chemical structure]

[0071] Scheme 6, step A depicts the protection of compound (31) using DMTCl with a suitable base such as DIEA in a solvent such as DCM to give compound (32). Step B shows an amide coupling between compound (32) and piperidin-4-yl methanol using HBTU and HOBt with TMP in a solvent such as DCM to give compound (33). The deprotection of compound (33) with 20% piperidine in DMF to give compound (34) is shown in step C.

[chemical structure]

[0072] Scheme 7, step A is essentially analogous to scheme 2, step A to give compound (35) from the coupling of compounds (16) and (34). Step B shows the formation of compound (36) by adding succinic anhydride to compound (35) in an appropriate solvent such as DCM with a base system of TEA and DMAP. Step C depicts the loading of compound (36) onto resin with 2-(1H-benzotriazol-1-yl)-1,1,3,3-tetramethyluronium hexafluorophosphate and a base such as DIEA in a solvent system such as MeCN and DCM to give compound (37).

### Preparation 1

### (6,7-Diacetoxy-2-methyl-5,6,7,7a-tetrahydro-3aH-pyrano[3,2-d]oxazol-5-yl)methyl acetate

[chemical structure]

[0073] To a solution of (5-acetamido-3,4,6-triacetoxy-tetrahydropyran-2-yl)methyl acetate (9.00 g, 23.1 mmol) in 1,2-DCE (46 mL) is added trimethylsilyl trifluoromethanesulfonate (6.5 mL, 35 mmol). The mixture is heated to 50° C. and stirred for 18 hours. After this time, the mixture is diluted with DCM (200 mL), washed with saturated NaHCO₃ (200 mL), and saturated aqueous sodium chloride solution (200 mL), dried over sodium sulfate, filtered, and concentrated in vacuo. The resulting residue is purified by silica gel flash chromatography eluting with 0-10% MeOH/DCM to give the title compound (6.434 g, 84%). ES/MS m/z 330 (M+H).

### Preparation 2

### (5-Acetamido-3,4-diacetoxy-6-hex-5-enoxy-tetrahydropyran-2-yl)methyl Acetate

[chemical structure]

[0074] To a solution of (6,7-diacetoxy-2-methyl-5,6,7,7a-tetrahydro-3aH-pyrano[3,2-d]oxazol-5-yl)methyl acetate (30.43 g, 92.42 mmol) in 1,2-DCE (231 mL) is added hex-5-en-1-ol (22.2 mL, 185 mmol) followed by activated powdered 4 Å molecular sieves (15.6 g). The suspension is stirred at ambient temperature for 30 minutes and trimethylsilyl trifluoromethanesulfonate (19 mL, 101.9 mmol) is then added. The mixture is stirred at ambient temperature for 18 hours. After this time, the solution is filtered through diatomaceous earth and concentrated in vacuo. The resulting residue is purified by silica gel flash chromatography eluting with 30-100% EtOAc/hexanes to give the title compound (34.76 g, 86%). ES/MS m/z 430.4 (M+H).

### Preparation 3

### 5-[3-Acetamido-4,5-diacetoxy-6-(acetoxymethyl)tetrahydropyran-2-yl]oxypentanoic Acid

[chemical structure]

[0075] A solution of (5-acetamido-3,4-diacetoxy-6-hex-5-enoxy-tetrahydropyran-2-yl)methyl acetate (34.76 g, 80.93 mmol) in MeCN (174 mL) and DCM (174 mL) is cooled to 0° C. A solution of sodium periodate (22.4 g, 104.7 mmol) is added and stirring is continued at 0° C. for 10 minutes. After this time, ruthenium (III) chloride (270 mg, 1.3 mmol) is added and the mixture is stirred while warming to ambient temperature. After stirring for 2 hours, additional sodium periodate (66 g, 308.4 mmol) is added and stirring is continued for 18 hours. After this time, the mixture is extracted with 3:1 CH₃Cl:IPA (2×500 mL), washed with saturated aqueous sodium chloride solution (1 L), dried over sodium sulfate, filtered, and concentrated in vacuo. The resulting residue is purified by silica gel flash chromatography eluting with 0-40% MeOH/DCM to give the title compound (29.75 g, 82%). ES/MS m/z 448.4 (M+H).

### Preparation 4

### Benzyl 6-aminohexanoate Hydrochloride

[chemical structure]

[0076] To a suspension of 6-aminohexanoic acid (5.00 g, 38.1 mmol) in THF (38 mL) is added benzyl alcohol (47 mL, 453.7 mmol) and the mixture is cooled to 0° C. Thionyl chloride (8.6 mL, 120 mmol) is added dropwise and the mixture is stirred for 18 hours while warming to ambient temperature. After this time, ether (166 mL) is added and the reaction vessel is transferred to a freezer at −20° C. for 1 hour. After this time, the solid precipitate is collected by filtration to give the title compound (8.57 g, 81%). ES/MS m/z 222 (M+H).

### Preparation 5

### Benzyl 11-aminoundecanoate Hydrochloride

[chemical structure]

[0077] The title compound is prepared from 11-aminoundecanoic acid in a manner essentially analogous to the method of preparation 4. ES/MS m/z 292.2 (M+H).

### Preparation 6

### Allyl 11-aminoundecanoate Hydrochloride

[chemical structure]

[0078] A vessel is charged with 11-aminoundecanoic acid (9.00 g, 44.7 mmol) in allyl alcohol (42 mL) and the mixture is cooled to 0° C. Thionyl chloride (6.5 mL, 89.4 mmol) is added and the mixture is stirred for 18 hours while warming to ambient temperature. After this time, the mixture is concentrated in vacuo and ether (200 mL) is added to the residue to obtain a white suspension. The mixture is stirred at ambient temperature for 10 minutes and the solid precipitate is collected by filtration to obtain the product (12.0 g, 97%). ES/MS m/z 242.2 (M+H).

### Preparation 7

### (2S)-3-[Bis(4-methoxyphenyl)-phenyl-methoxy]-2-(9H-fluoren-9ylmethoxycarbonylamino) propanoic Acid

[chemical structure]

[0079] To a stirring solution of (2S)-2-(9H-fluoren-9-ylmethoxycarbonylamino)-3-hydroxy-propanoic acid (40 g, 0.122 mol) in dry DCM (400 mL) is added DIEA (64 mL, 0.366 mol) at 0° C. under inert atmosphere. To this, a solution of DMTCl (49.6 g, 0.146 mol) in DCM (200 mL) is added slowly. The resulting reaction mixture is brought to ambient temperature and stirred for 16 hours. After this time, the reaction mixture is diluted with water (12.5 vol) and extracted with DCM (25 vol). The organic layer is dried over anhydrous sodium sulphate, filtered, and concentrated in vacuo. The crude obtained is washed with 10% EtOAc/hexane (12.5 vol) and dried under vacuum to give the title compound as a pale brown solid (62 g, crude). This material was taken to next step without any further purification.

[0080] TLC: 5% MeOH/CH₂Cl₂ (R_{f}: 0.5) UV, 254 nM.

### Preparation 8

### 9H-Fluoren-9-ylmethyl N-[(1S)-1-[[bis(4-methoxyphenyl)-phenyl-methoxy]methyl]-2-[4-(hydroxymethyl)-1-piperidyl]-2-oxo-ethyl]carbamate

[chemical structure]

[0081] To a stirring solution of (2S)-3-[bis(4-methoxyphenyl)-phenyl-methoxy]-2-(9H-fluoren-9ylmethoxycarbonylamino) propanoic acid (62 g, 0.103 mol) in DCM (750 mL) are added slowly HBTU (78.3 g, 0.206 mol), HOBt (27.9 g, 0.206 mol), and piperidin-4-yl methanol (15.4 g, 0.134 mol) followed by TMP (15 mL, 0.113 mol) at 0° C. under inert atmosphere. The resulting reaction mixture is brought to ambient temperature and stirred for 4 hours. After this time, the reaction mixture is diluted with water (8 vol) and extracted with DCM (15 vol). The organic layer is dried over anhydrous sodium sulphate, filtered, and concentrated in vacuo. The resulting residue is purified by silica gel flash chromatography eluting with 20-40% EtOAc/hexane and 1% MeOH/DCM to give the title compound (40 g, 52% over two steps). ¹H NMR (DMSO-d₆) δ 7.88 (br d, J=7.5 Hz, 2H), 7.79-7.59 (m, 3H), 7.45-7.12 (m, 13H), 6.92-6.76 (m, 4H), 4.79-4.44 (m, 2H), 4.32 (br d, J=11.4 Hz, 2H), 4.20 (br s, 2H), 3.71 (s, 6H), 3.21 (br s, 4H), 2.99-2.79 (m, 1H), 2.69 (br s, 2H), 1.81-1.43 (m, 3H), 1.08-0.73 (m, 2H).

### Preparation 9

### (2S)-2-Amino-3-[bis(4-methoxyphenyl)-phenyl-methoxy]-1-[4-(hydroxymethyl)-1-piperidyl]propan-1-one

[chemical structure]

[0082] A solution of 20% piperidine in DMF (400 mL) is added slowly to 9H-fluoren-9-ylmethyl N-[(1S)-1-[[bis(4-methoxyphenyl)-phenyl-methoxy]methyl]-2-[4-(hydroxymethyl)-1-piperidyl]-2-oxo-ethyl]carbamate (40 g, 0.055 mol) at 0° C. under inert atmosphere. The resulting reaction mixture is stirred at ambient temperature for 1 hour. After this time, the mixture is diluted with water (15 vol) and extracted with EtOAc (30 vol). The organic layer is dried over anhydrous sodium sulphate, filtered, and concentrated in vacuo. The resulting residue is purified by silica gel flash chromatography eluting with 1-8% MeOH/DCM to give the title compound as an off white solid (13 g, 47%). ES/MS m/z 1009.5 (2M+H).

### Preparation 10

### Methyl (2S)-5-[bis[2-(tert-butoxycarbonylamino)ethyl]amino]-2-(tert-butoxycarbonylamino)-5-oxo-pentanoate

[chemical structure]

[0083] To a flask containing(S)-4-((tert-butoxycarbonyl)amino)-5-methoxy-5-oxopentanoic acid (7.00 g, 26.8 mmol) and HOBt (4.16 g, 30.8 mmol) are added DMF (179 mL) and (2-(1H-benzotriazol-1-yl)-1,1,3,3-tetramethyluronium hexafluorophosphate (11.7 g, 30.9 mmol). DIEA (14 mL, 80.3 mmol) is added and the mixture is stirred at ambient temperature for 5 minutes. After this time, tert-butyl N-[2-[2-(tert-butoxycarbonylamino)ethylamino]ethyl]carbamate (8.94 g, 29.5 mmol) is added in one portion and stirring is continued at ambient temperature. After stirring for 18 hours, the mixture is diluted with EtOAc (400 mL), washed with water (2×400 mL) and saturated aqueous sodium chloride solution (400 mL), dried over sodium sulfate, filtered, and concentrated in vacuo. The resulting residue is purified by silica gel flash chromatography eluting with 40-100% EtOAc/hexanes to give the title compound (13.01 g, 89%). ES/MS m/z 547.40 (M+H).

### Preparation 11

### (2S)-5-[Bis[2-(tert-butoxycarbonylamino)ethyl]amino]-2-(tert-butoxycarbonylamino)-5-oxo-pentanoic Acid

[chemical structure]

[0084] A flask is charged with methyl (2S)-5-[bis[2-(tert-butoxycarbonylamino)ethyl]amino]-2-(tert-butoxycarbonylamino)-5-oxo-pentanoate (13.01 g, 23.8 mmol), THF (120 mL), and MeOH (120 mL). IN NaOH (71 mL, 71 mmol) is added and the mixture is stirred at ambient temperature. After 1 hour, the mixture is concentrated in vacuo and redissolved in water (300 mL). 5N HCl (12 mL) is added to bring the pH to 4. The mixture is extracted with DCM (3×300 mL) and the combined organic layers are washed with saturated aqueous sodium chloride solution (1 L), dried over sodium sulfate, filtered, and concentrated to give the title compound (12.41 g, 98%). ES/MS m/z 531.60 (M−H).

### Preparation 12

### Allyl 11-[[(2S)-5-[bis[2-(tert-butoxycarbonylamino)ethyl]amino]-2-(tert-butoxycarbonylamino)-5-oxo-pentanoyl]amino]undecanoate

[chemical structure]

[0085] To a flask containing (2S)-5-[bis[2-(tert-butoxycarbonylamino)ethyl]amino]-2-(tert-butoxycarbonylamino)-5-oxo-pentanoic acid (500 mg, 0.94 mmol) and allyl 11-aminoundecanoate hydrochloride (313 mg, 1.13 mmol) is added DMF (6.25 mL) and (1-[bis(dimethylamino)methylene]-1H-1,2,3-triazolo[4,5-b]pyridinium 3-oxide hexafluorophosphate (428 mg, 1.12 mmol). Following addition of DIEA (0.5 mL, 3 mmol) the mixture is stirred at ambient temperature for 18 hours. After this time, the mixture is diluted with EtOAc (200 mL), washed with water (3×200 mL) and saturated aqueous sodium chloride solution (200 mL), dried over sodium sulfate, filtered, and concentrated in vacuo. The resulting residue is purified by silica gel flash chromatography eluting with 40-100% EtOAc/hexanes to give the title compound (687 mg, 97%). ¹H NMR (DMSO-d6) δ 7.78-7.64 (m, 1H), 6.98-6.7 (m, 2H), 5.96-5.84 (m, 1H), 5.31-5.25 (m, 1H), 5.23-5.17 (m, 1H), 4.56-4.50 (m, 2H), 3.88-3.67 (m, 1H), 3.30-3.19 (m, 4H), 3.11-2.91 (m, 6H), 2.35-2.12 (m, 4H), 1.88-1.65 (m, 2H), 1.58-1.47 (m, 2H), 1.46-1.30 (m, 30H), 1.30-1.18 (m, 12H).

### Preparation 13

### Allyl (S)-11-(2-amino-5-(bis(2-aminoethyl)amino)-5-oxopentanamido)undecanoate

[chemical structure]

[0086] To a solution of allyl 11-[[(2S)-5-[bis[2-(tert-butoxycarbonylamino)ethyl]amino]-2-(tert-butoxycarbonylamino)-5-oxo-pentanoyl]amino]undecanoate (687 mg, 0.91 mmol) in DCM (15 mL) is added TFA (15 mL). The mixture is stirred at ambient temperature. After 1.5 hours, the mixture is concentrated in vacuo. The residue is taken up in MeOH and applied to an ion exchange cartridge. The cartridge is eluted with MeOH (150 mL) followed by 7N NH₃/MeOH (150 mL). The basic fraction is concentrated in vacuo to give the title compound (410 mg, 99%). ES/MS m/z 456.4 (M+H).

### Preparation 14

### Allyl 11-[[(2S)-2-[5-[3-acetamido-4,5-diacetoxy-6-(acetoxymethyl)tetrahydropyran-2-yl]oxypentanoylamino]-5-[bis[2-[5-[3-acetamido-4,5-diacetoxy-6-(acetoxymethyl)tetrahydropyran-2-yl]oxypentanoylamino]ethyl]amino]-5-oxo-pentanoyl]amino]undecanoate

[chemical structure]

[0087] A flask is charged with 5-[3-acetamido-4,5-diacetoxy-6-(acetoxymethyl)tetrahydropyran-2-yl]oxypentanoic acid (489 mg, 1.09 mmol) and allyl (S)-11-(2-amino-5-(bis(2-aminoethyl)amino)-5-oxopentanamido)undecanoate (150 mg, 0.33 mmol). DCM (3.35 mL) is added followed by 1-hydroxybenzotriazole monohydrate (164 mg, 1.07 mmol) and 1-(3-dimethylaminopropyl)-3-ethylcarbodiimide hydrochloride (206 mg, 1.07 mmol). The mixture is stirred at ambient temperature for 18 hours. After this time, the solution is diluted with EtOAc (100 mL), washed with saturated NaHCO₃ (2×100 mL), saturated aqueous NH₄Cl (100 mL), and saturated aqueous sodium chloride solution (100 mL). The organic layer is dried over sodium sulfate, filtered, and concentrated in vacuo. The resulting residue is purified by silica gel flash chromatography eluting with 0-10% MeOH/DCM to give the title compound (424 mg, 74%). ES/MS m/z 872.80 (M+2H)/2.

### Preparation 15

### 11-[[(2S)-2-[5-[3-Acetamido-4,5-diacetoxy-6-(acetoxymethyl)tetrahydropyran-2-yl]oxypentanoylamino]-5-[bis[2-[5-[3-acetamido-4,5-diacetoxy-6-(acetoxymethyl)tetrahydropyran-2-yl]oxypentanoylamino]ethyl]amino]-5-oxo-pentanoyl]amino]undecanoic Acid

[chemical structure]

[0088] To a solution of allyl 11-[[(2S)-2-[5-[3-acetamido-4,5-diacetoxy-6-(acetoxymethyl)tetrahydropyran-2-yl]oxypentanoylamino]-5-[bis[2-[5-[3-acetamido-4,5-diacetoxy-6-(acetoxymethyl)tetrahydropyran-2-yl]oxypentanoylamino]ethyl]amino]-5-oxo-pentanoyl]amino]undecanoate (354 mg, 0.20 mmol) in DCM (2 mL) is added tetrakis(triphenylphosphine) palladium (29 mg, 0.02 mmol) followed by PhSiH₃ (51 uL, 0.41 mmol). The mixture is stirred at ambient temperature for 2 hours, after which it is diluted with saturated aqueous NaHCO₃ (100 mL). IN NaOH (15 mL) is added to bring the pH to about 10. The aqueous solution is washed with DCM (3×100 mL) and then acidified with concentrated HCl (5 mL) and then aqueous 5N HCl (15 mL). The aqueous layer is extracted with DCM (100 mL) and the organic layer is dried over sodium sulfate, filtered, and concentrated in vacuo. The resulting residue is purified by silica gel flash chromatography eluting with 0-20% MeOH/DCM to give the title compound (151 mg, 44%). ES/MS m/z 852.60 (M+2H)/2.

### Preparation 16

### (2,5-Dioxopyrrolidin-1-yl) 11-[[(2S)-2-[5-[3-acetamido-4,5-diacetoxy-6-(acetoxymethyl)tetrahydropyran-2-yl]oxypentanoylamino]-5-[bis[2-[5-[3-acetamido-4,5-diacetoxy-6-(acetoxymethyl)tetrahydropyran-2-yl]oxypentanoylamino]ethyl]amino]-5-oxo-pentanoyl]amino]undecanoate

[chemical structure]

[0089] To a reaction vial are added 11-[[(2S)-2-[5-[3-acetamido-4,5-diacetoxy-6-(acetoxymethyl)tetrahydropyran-2-yl]oxypentanoylamino]-5-[bis[2-[5-[3-acetamido-4,5-diacetoxy-6-(acetoxymethyl)tetrahydropyran-2-yl]oxypentanoylamino]ethyl]amino]-5-oxo-pentanoyl]amino]undecanoic acid (50 mg, 0.03 mmol), N-hydroxysuccinimide (5 mg, 0.04 mmol), and 1-(3-dimethylaminopropyl)-3-ethylcarbodiimide hydrochloride (8 mg, 0.04 mmol). DCM (0.3 mL) is added and the mixture is stirred at ambient temperature. After 18 hours, the mixture is loaded directly onto a silica gel cartridge and the crude mixture is purified by silica gel flash chromatography eluting with 0-10% MeOH/DCM to give the title compound (49 mg, 93%). ES/MS m/z 901.40 (M+2H)/2.

### Preparation 17

### Benzyl 6-[[(2S)-5-[bis[2-(tert-butoxycarbonylamino)ethyl]amino]-2-(tert-butoxycarbonylamino)-5-oxo-pentanoyl]amino]hexanoate

[chemical structure]

[0090] The title compound is prepared from (2S)-5-[bis[2-(tert-butoxycarbonylamino)ethyl]amino]-2-(tert-butoxycarbonylamino)-5-oxo-pentanoic acid and benzyl 6-aminohexanoate hydrochloride in a manner essentially analogous to the method of preparation 10. ES/MS m/z 736.40 (M+H).

### Preparation 18

### Benzyl 6-[[(2S)-2-amino-5-[bis(2-aminoethyl)amino]-5-oxo-pentanoyl]amino]hexanoate tris(trifluoroacetic Acid)

[chemical structure]

[0091] To a solution of benzyl 6-[[(2S)-5-[bis[2-(tert-butoxycarbonylamino)ethyl]amino]-2-(tert-butoxycarbonylamino)-5-oxo-pentanoyl]amino]hexanoate (15.47 g, 21.02 mmol) in DCM (105 mL) is added TFA (16 mL, 210.2 mmol). The mixture is stirred at ambient temperature for 24 hours. After this time, additional TFA (16 mL, 210.2 mmol) is added and stirring is continued for an additional 2 hours. After this time, the mixture is concentrated in vacuo. The resulting residue is azeotroped with toluene (2×30 mL). The resulting oil is further dried in a vacuum oven at 40° C. for 4 hours to give the title compound (28.08 g, 58% purity accounting for residual toluene, 99+%). ES/MS m/z 436.40 (M+H). The compound is dissolved in 70 mL DMF to make a 0.3M solution that is used in the next step.

### Preparation 19

### Benzyl 6-[[(2S)-2-[5-[3-acetamido-4,5-diacetoxy-6-(acetoxymethyl)tetrahydropyran-2-yl]oxypentanoylamino]-5-[bis[2-[5-[3-acetamido-4,5-diacetoxy-6-(acetoxymethyl)tetrahydropyran-2-yl]oxypentanoylamino]ethyl]amino]-5-oxo-pentanoyl]amino]hexanoate

[chemical structure]

[0092] The title compound is prepared from 5-[3-acetamido-4,5-diacetoxy-6-(acetoxymethyl)tetrahydropyran-2-yl]oxypentanoic acid and benzyl 6-[[(2S)-2-amino-5-[bis(2-aminoethyl)amino]-5-oxo-pentanoyl]amino]hexanoate tris trifluoroacetic acid and in a manner essentially analogous to the method of preparation 10. ES/MS m/z 862 (M+2H)/2.

### Preparation 20

### 6-[[(2S)-2-[5-[3-Acetamido-4,5-diacetoxy-6-(acetoxymethyl)tetrahydropyran-2-yl]oxypentanoylamino]-5-[bis[2-[5-[3-acetamido-4,5-diacetoxy-6-(acetoxymethyl)tetrahydropyran-2-yl]oxypentanoylamino]ethyl]amino]-5-oxo-pentanoyl]amino]hexanoic Acid

[chemical structure]

[0093] Palladium on carbon (1.90 g, 0.89 mmol, 5 mass %, 50% wet) is placed in a round-bottom flask and the vessel is evacuated and backfilled with nitrogen three times. A solution of benzyl 6-[[(2S)-2-[5-[3-acetamido-4,5-diacetoxy-6-(acetoxymethyl)tetrahydropyran-2-yl]oxypentanoylamino]-5-[bis[2-[5-[3-acetamido-4,5-diacetoxy-6-(acetoxymethyl)tetrahydropyran-2-yl]oxypentanoylamino]ethyl]amino]-5-oxo-pentanoyl]amino]hexanoate (15.41 g, 8.94 mmol) in MeOH (178 mL) is added via syringe. The flask is evacuated and backfilled with 1 atm hydrogen and the mixture is stirred at ambient temperature under 1 atm hydrogen for 18 hours. After this time, the mixture is filtered through diatomaceous earth and the filtrate is concentrated in vacuo to give the title compound (13.85 g, 95%). ES/MS m/z 817.2 (M+2H)/2.

### Preparation 21

### (2,5-Dioxopyrrolidin-1-yl) 6-[[(2S)-2-[5-[3-acetamido-4,5-diacetoxy-6-(acetoxymethyl)tetrahydropyran-2-yl]oxypentanoylamino]-5-[bis[2-[5-[3-acetamido-4,5-diacetoxy-6-(acetoxymethyl)tetrahydropyran-2-yl]oxypentanoylamino]ethyl]amino]-5-oxo-pentanoyl]amino]hexanoate

[chemical structure]

[0094] The title compound is prepared from 6-[[(2S)-2-[5-[3-acetamido-4,5-diacetoxy-6-(acetoxymethyl)tetrahydropyran-2-yl]oxypentanoylamino]-5-[bis[2-[5-[3-acetamido-4,5-diacetoxy-6-(acetoxymethyl)tetrahydropyran-2-yl]oxypentanoylamino]ethyl]amino]-5-oxo-pentanoyl]amino]hexanoic acid in a manner essentially analogous to the method of preparation 16. ES/MS m/z 866.20 (M+2H)/2.

### Preparation 22

### Benzyl (2S)-5-[bis[2-(tert-butoxycarbonylamino)ethyl]amino]-2-(tert-butoxycarbonylamino)-5-oxo-pentanoate

[chemical structure]

[0095] The title compound is prepared from tert-butyl N-[2-[2-(tert-butoxycarbonylamino)ethylamino]ethyl]carbamate and (4S)-5-benzyloxy-4-(tert-butoxycarbonylamino)-5-oxo-pentanoic acid in a manner essentially analogous to the method of preparation 12. ES/MS m/z 623.6 (M+H).

### Preparation 23

### Benzyl (2S)-2-amino-5-[bis(2-aminoethyl)amino]-5-oxo-pentanoate tris(trifluoroacetic Acid) Salt

[chemical structure]

[0096] The title compound is prepared from benzyl (2S)-5-[bis[2-(tert-butoxycarbonylamino)ethyl]amino]-2-(tert-butoxycarbonylamino)-5-oxo-pentanoate in a manner essentially analogous to the method of preparation 18. ES/MS m/z 323.2 (M+H).

### Preparation 24

### Benzyl (2S)-5-[bis[2-[5-(tert-butoxycarbonylamino)pentanoylamino]ethyl]amino]-2-[5-(tert-butoxycarbonylamino)pentanoylamino]-5-oxo-pentanoate

[chemical structure]

[0097] The title compound is prepared from 5-(tert-butoxycarbonylamino)pentanoic acid and benzyl (2S)-2-amino-5-[bis(2-aminoethyl)amino]-5-oxo-pentanoate tris(trifluoroacetic acid) salt in a manner essentially analogous to the method of preparation 10. ES/MS m/z 920.6 (M+H).

### Preparation 25

### Benzyl (2S)-2-(5-aminopentanoylamino)-5-[bis[2-(5-aminopentanoylamino)ethyl]amino]-5-oxo-pentanoate tris(trifluoroacetic Acid) Salt

[chemical structure]

[0098] The title compound is prepared from benzyl (2S)-5-[bis[2-[5-(tert-butoxycarbonylamino)pentanoylamino]ethyl]amino]-2-[5-(tert-butoxycarbonylamino)pentanoylamino]-5-oxo-pentanoate in a manner essentially analogous to the method of preparation 18. ES/MS m/z 620.4 (M+H).

### Preparation 26

### Benzyl (2S)-2-[5-[5-[3-acetamido-4,5-diacetoxy-6-(acetoxymethyl)tetrahydropyran-2-yl]oxypentanoylamino]pentanoylamino]-5-[bis[2-[5-[5-[3-acetamido-4,5-diacetoxy-6-(acetoxymethyl)tetrahydropyran-2-yl]oxypentanoylamino]pentanoylamino]ethyl]amino]-5-oxo-pentanoate

[chemical structure]

[0099] The title compound is prepared from 5-[3-acetamido-4,5-diacetoxy-6-(acetoxymethyl)tetrahydropyran-2-yl]oxypentanoic acid and benzyl (2S)-2-(5-aminopentanoylamino)-5-[bis[2-(5-aminopentanoylamino)ethyl]amino]-5-oxo-pentanoate tris(trifluoroacetic acid) salt and in a manner essentially analogous to the method of preparation 10. ES/MS m/z 954.80 (M+2H)/2.

### Preparation 27

### (2S)-2-[5-[5-[3-Acetamido-4,5-diacetoxy-6-(acetoxymethyl)tetrahydropyran-2-yl]oxypentanoylamino]pentanoylamino]-5-[bis[2-[5-[5-[3-acetamido-4,5-diacetoxy-6-(acetoxymethyl)tetrahydropyran-2-yl]oxypentanoylamino]pentanoylamino]ethyl]amino]-5-oxo-pentanoic Acid

[chemical structure]

[0100] A round-bottom flask is charged with palladium on carbon (467 mg, 0.22 mmol, 5 mass %, 50% wet) and the flask is evacuated and backfilled with nitrogen three times. A solution of benzyl (2S)-2-[5-[5-[3-acetamido-4,5-diacetoxy-6-(acetoxymethyl)tetrahydropyran-2-yl]oxypentanoylamino]pentanoylamino]-5-[bis[2-[5-[5-[3-acetamido-4,5-diacetoxy-6-(acetoxymethyl)tetrahydropyran-2-yl]oxypentanoylamino]pentanoylamino]ethyl]amino]-5-oxo-pentanoate (4.19 g, 2.20 mmol) in MeOH (44 mL) is added via syringe followed by three drops of acetic acid. The flask is evacuated and backfilled with 1 atm hydrogen and the mixture is stirred at ambient temperature under 1 atm hydrogen. After 2 hours, the mixture is filtered through diatomaceous earth and the filtrate is concentrated in vacuo to give the title compound (3.99 g, 99+%). ES/MS m/z 909.6 (M+2H)/2.

### Preparation 28

### Benzyl 6-[[(2S)-2-[5-[5-[3-acetamido-4,5-diacetoxy-6-(acetoxymethyl)tetrahydropyran-2-yl]oxypentanoylamino]pentanoylamino]-5-[bis[2-[5-[5-[3-acetamido-4,5-diacetoxy-6-(acetoxymethyl)tetrahydropyran-2-yl]oxypentanoylamino]pentanoylamino]ethyl]amino]-5-oxo-pentanoyl]amino]hexanoate

[chemical structure]

[0101] The title compound is prepared from (2S)-2-[5-[5-[3-acetamido-4,5-diacetoxy-6-(acetoxymethyl)tetrahydropyran-2-yl]oxypentanoylamino]pentanoylamino]-5-[bis[2-[5-[5-[3-acetamido-4,5-diacetoxy-6-(acetoxymethyl)tetrahydropyran-2-yl]oxypentanoylamino]pentanoylamino]ethyl]amino]-5-oxo-pentanoic acid and benzyl 6-aminohexanoate hydrochloride and in a manner essentially analogous to the method of preparation 10. ES/MS m/z 1011.6 (M+2H)/2.

### Preparation 29

### 6-[[(2S)-2-[5-[5-[3-Acetamido-4,5-diacetoxy-6-(acetoxymethyl)tetrahydropyran-2-yl]oxypentanoylamino]pentanoylamino]-5-[bis[2-[5-[5-[3-acetamido-4,5-diacetoxy-6-(acetoxymethyl)tetrahydropyran-2-yl]oxypentanoylamino]pentanoylamino]ethyl]amino]-5-oxo-pentanoyl]amino]hexanoic Acid

[chemical structure]

[0102] A round-bottom flask is charged with palladium on carbon (24 mg, 0.01 mmol, 5% by mass, 50% wet) and the flask is evacuated and backfilled with nitrogen. A solution of benzyl 6-[[(2S)-2-[5-[5-[3-acetamido-4,5-diacetoxy-6-(acetoxymethyl)tetrahydropyran-2-yl]oxypentanoylamino]pentanoylamino]-5-[bis[2-[5-[5-[3-acetamido-4,5-diacetoxy-6-(acetoxymethyl)tetrahydropyran-2-yl]oxypentanoylamino]pentanoylamino]ethyl]amino]-5-oxo-pentanoyl]amino]hexanoate (222 mg, 0.11 mmol) in MeOH (2.2 mL) is added via syringe followed by three drops of acetic acid. The flask is evacuated and backfilled with 1 atm hydrogen and the mixture is stirred under 1 atm hydrogen at ambient temperature. After 5 hours, the flask is purged with nitrogen and the mixture is filtered through diatomaceous earth. The filtrate is concentrated in vacuo to give the title compound (180 mg, 85%). ES/MS m/z 966.2 (M+2H)/2.

### Preparation 30

### (2,5-Dioxopyrrolidin-1-yl) 6-[[(2S)-2-[5-[5-[3-acetamido-4,5-diacetoxy-6-(acetoxymethyl)tetrahydropyran-2-yl]oxypentanoylamino]pentanoylamino]-5-[bis[2-[5-[5-[3-acetamido-4,5-diacetoxy-6-(acetoxymethyl)tetrahydropyran-2-yl]oxypentanoylamino]pentanoylamino]ethyl]amino]-5-oxo-pentanoyl]amino]hexanoate

[chemical structure]

[0103] The title compound is prepared from 6-[[(2S)-2-[5-[5-[3-acetamido-4,5-diacetoxy-6-(acetoxymethyl)tetrahydropyran-2-yl]oxypentanoylamino]pentanoylamino]-5-[bis[2-[5-[5-[3-acetamido-4,5-diacetoxy-6-(acetoxymethyl)tetrahydropyran-2-yl]oxypentanoylamino]pentanoylamino]ethyl]amino]-5-oxo-pentanoyl]amino]hexanoic acid in a manner essentially analogous to the method of preparation 16. ES/MS m/z 1014.6 (M+2H)/2.

### Preparation 31

### Benzyl 11-[[(2S)-2-[5-[5-[3-acetamido-4,5-diacetoxy-6-(acetoxymethyl)tetrahydropyran-2-yl]oxypentanoylamino]pentanoylamino]-5-[bis[2-[5-[5-[3-acetamido-4,5-diacetoxy-6-(acetoxymethyl)tetrahydropyran-2-yl]oxypentanoylamino]pentanoylamino]ethyl]amino]-5-oxo-pentanoyl]amino]undecanoate

[chemical structure]

[0104] The title compound is prepared from (2S)-2-[5-[5-[3-acetamido-4,5-diacetoxy-6-(acetoxymethyl)tetrahydropyran-2-yl]oxypentanoylamino]pentanoylamino]-5-[bis[2-[5-[5-[3-acetamido-4,5-diacetoxy-6-(acetoxymethyl)tetrahydropyran-2-yl]oxypentanoylamino]pentanoylamino]ethyl]amino]-5-oxo-pentanoic acid and benzyl 11-aminoundecanoate hydrochloride in a manner essentially analogous to the method of preparation 10. ES/MS m/z 1046.6 (M+2H)/2.

### Preparation 32

### 11-[[(2S)-2-[5-[5-[3-Acetamido-4,5-diacetoxy-6-(acetoxymethyl)tetrahydropyran-2-yl]oxypentanoylamino]pentanoylamino]-5-[bis[2-[5-[5-[3-acetamido-4,5-diacetoxy-6-(acetoxymethyl)tetrahydropyran-2-yl]oxypentanoylamino]pentanoylamino]ethyl]amino]-5-oxo-pentanoyl]amino]undecanoic Acid

[chemical structure]

[0105] To a round-bottom flask is added palladium on carbon (35 mg, 0.02 mmol, 5 mass %, 50% wet) and the flask is evacuated and backfilled with nitrogen three times. A solution of benzyl 11-[[(2S)-2-[5-[5-[3-acetamido-4,5-diacetoxy-6-(acetoxymethyl)tetrahydropyran-2-yl]oxypentanoylamino]pentanoylamino]-5-[bis[2-[5-[5-[3-acetamido-4,5-diacetoxy-6-(acetoxymethyl)tetrahydropyran-2-yl]oxypentanoylamino]pentanoylamino]ethyl]amino]-5-oxo-pentanoyl]amino]undecanoate (285 mg, 80% purity, 0.11 mmol) is added via syringe. The vessel is evacuated and backfilled with 1 atm hydrogen and the mixture is then stirred at ambient temperature under 1 atm hydrogen. After stirring for 3 hours, the flask is purged with nitrogen and the mixture is filtered through diatomaceous earth. The filtrate is concentrated to give the title compound (213 mg, 79% purity, 77%). ES/MS m/z 1001.20 (M+2H)/2.

### Preparation 33

### (2,5-Dioxopyrrolidin-1-yl) 11-[[(2S)-2-[5-[5-[3-acetamido-4,5-diacetoxy-6-(acetoxymethyl)tetrahydropyran-2-yl]oxypentanoylamino]pentanoylamino]-5-[bis[2-[5-[5-[3-acetamido-4,5-diacetoxy-6-(acetoxymethyl)tetrahydropyran-2-yl]oxypentanoylamino]pentanoylamino]ethyl]amino]-5-oxo-pentanoyl]amino]undecanoate

[chemical structure]

[0106] The title compound is prepared from 11-[[(2S)-2-[5-[5-[3-acetamido-4,5-diacetoxy-6-(acetoxymethyl)tetrahydropyran-2-yl]oxypentanoylamino]pentanoylamino]-5-[bis[2-[5-[5-[3-acetamido-4,5-diacetoxy-6-(acetoxymethyl)tetrahydropyran-2-yl]oxypentanoylamino]pentanoylamino]ethyl]amino]-5-oxo-pentanoyl]amino]undecanoic acid in a manner essentially analogous to the method of preparation 16. ES/MS m/z 1050 (M+2H)/2

### Preparation 34

### [5-Acetamido-6-[5-[2-[[(4S)-4-[5-[3-acetamido-4,5-diacetoxy-6-(acetoxymethyl)tetrahydropyran-2-yl]oxypentanoylamino]-5-[[6-[[(1S)-1-[[bis(4-methoxyphenyl)-phenyl-methoxy]methyl]-2-[4-(hydroxymethyl)-1-piperidyl]-2-oxo-ethyl]amino]-6-oxo-hexyl]amino]-5-oxo-pentanoyl]-[2-[5-[3-acetamido-4,5-diacetoxy-6-(acetoxymethyl)tetrahydropyran-2-yl]oxypentanoylamino]ethyl]amino]ethylamino]-5-oxo-pentoxy]-3,4-diacetoxy-tetrahydropyran-2-yl]methyl Acetate

[chemical structure]

[0107] The title compound is prepared from 6-[[(2S)-2-[5-[3-acetamido-4,5-diacetoxy-6-(acetoxymethyl)tetrahydropyran-2-yl]oxypentanoylamino]-5-[bis[2-[5-[3-acetamido-4,5-diacetoxy-6-(acetoxymethyl)tetrahydropyran-2-yl]oxypentanoylamino]ethyl]amino]-5-oxo-pentanoyl]amino]hexanoic acid and (2S)-2-amino-3-[bis(4-methoxyphenyl)-phenyl-methoxy]-1-[4-(hydroxymethyl)-1-piperidyl]propan-1-one in a manner essentially analogous to the method of preparation 10. ES/MS m/z 1059.2 (M−2H)/2.

### Preparation 35

### 4-[1-[[(2S)-2-[6-[[(2S)-2-[5-[3-Acetamido-4,5-diacetoxy-6-(acetoxymethyl)tetrahydropyran-2-yl]oxypentanoylamino]-5-[bis[2-[5-[3-acetamido-4,5-diacetoxy-6-(acetoxymethyl)tetrahydropyran-2-yl]oxypentanoylamino]ethyl]amino]-5-oxo-pentanoyl]amino]hexanoylamino]-3-[bis(4-methoxyphenyl)-phenyl-methoxy]propanoyl]-4-piperidyl]methoxy]-4-oxo-butanoic Acid

[chemical structure]

[0108] To a solution of [5-acetamido-6-[5-[2-[[(4S)-4-[5-[3-acetamido-4,5-diacetoxy-6-(acetoxymethyl)tetrahydropyran-2-yl]oxypentanoylamino]-5-[[6-[[(1S)-1-[[bis(4-methoxyphenyl)-phenyl-methoxy]methyl]-2-[4-(hydroxymethyl)-1-piperidyl]-2-oxo-ethyl]amino]-6-oxo-hexyl]amino]-5-oxo-pentanoyl]-[2-[5-[3-acetamido-4,5-diacetoxy-6-(acetoxymethyl)tetrahydropyran-2-yl]oxypentanoylamino]ethyl]amino]ethylamino]-5-oxo-pentoxy]-3,4-diacetoxy-tetrahydropyran-2-yl]methyl acetate (1.194 g, 0.56 mmol) in DCM (11 mL) is added succinic anhydride (113 mg, 1.13 mmol), TEA (0.4 mL, 3 mmol) and DMAP (213 mg, 1.69 mmol). The mixture is stirred at ambient temperature for 1 hour. After this time, the mixture is diluted with saturated NH₄Cl (200 mL) and extracted with DCM (3× 200 mL) and 3:1 CHCl₃:IPA (200 mL). The organic layers are combined, dried over sodium sulfate, filtered, and concentrated in vacuo. The resulting residue is purified by silica gel flash chromatography eluting with 0-40% MeOH/DCM and the resulting product is dried in a vacuum oven at 40° C. for 3 hours to give the title compound (1.081 g, 86%). ES/MS m/z 1109.60 (M−2H)/2.

### Preparation 36

### Resin Loading

[chemical structure]

[0109] A solution of 4-[1-[[(2S)-2-[6-[[(2S)-2-[5-[3-acetamido-4,5-diacetoxy-6-(acetoxymethyl)tetrahydropyran-2-yl]oxypentanoylamino]-5-[bis[2-[5-[3-acetamido-4,5-diacetoxy-6-(acetoxymethyl)tetrahydropyran-2-yl]oxypentanoylamino]ethyl]amino]-5-oxo-pentanoyl]amino]hexanoylamino]-3-[bis(4-methoxyphenyl)-phenyl-methoxy]propanoyl]-4-piperidyl]methoxy]-4-oxo-butanoic acid (1.00 g, 0.61 mmol) in MeCN (6 mL) and DCM (1 mL) is transferred to a resin loading cartridge. To the vessel are added 2-(1H-benzotriazol-1-yl)-1,1,3,3-tetramethyluronium hexafluorophosphate (386 mg, 0.97 mmol) and DIEA (0.25 mL, 0.48 mmol) and the cartridge is shaken at ambient temperature for 5 minutes. After this time, 1000 Å LCAA controlled-pore glass resin (5.39 g, 90 μmol/g loading, purchased from ChemGenes) is added and the mixture is shaken at ambient temperature for 18 hours. After this time, the cartridge is drained by suction and the resin is washed by shaking with DCM (10 mL) for 10 minutes. The cartridge is drained and the washing and draining procedure is repeated with 10% MeOH/DCM (10 mL) and Et₂O (10 mL). After draining, a solution of acetic anhydride (6.4 mL), pyridine (20 mL) and TEA (0.22 mL) is added and the cartridge is shaken for 2 hours. After this time, the cartridge is drained and the washing and draining procedure above is repeated using DCM (10 mL), 10% MeOH/DCM (10 mL) and diethyl ether (10 mL). After draining, the resin is dried under vacuum for 30 minutes. The resin loading is determined using a standard trityl assay. The resin loading was calculated to be 34.7 μmol/g.

### Preparation 37

### Benzyl 2-[2-[[(2S)-2-[5-[5-[3-acetamido-4,5-diacetoxy-6-(acetoxymethyl)tetrahydropyran-2-yl]oxypentanoylamino]pentanoylamino]-5-[bis[2-[5-[5-[3-acetamido-4,5-diacetoxy-6-(acetoxymethyl)tetrahydropyran-2-yl]oxypentanoylamino]pentanoylamino]ethyl]amino]-5-oxo-pentanoyl]amino]ethoxy]acetate

[chemical structure]

[0110] The title compound is prepared from (2S)-2-[5-[5-[3-Acetamido-4,5-diacetoxy-6-(acetoxymethyl)tetrahydropyran-2-yl]oxypentanoylamino]pentanoylamino]-5-[bis[2-[5-[5-[3-acetamido-4,5-diacetoxy-6-(acetoxymethyl)tetrahydropyran-2-yl]oxypentanoylamino]pentanoylamino]ethyl]amino]-5-oxo-pentanoic acid and benzyl 2-(2-aminoethoxy)acetate hydrochloride in a manner essentially analogous to the method of preparation 10. ES/MS m/z 1005.2 (M+2H/2).

### Preparation 38

### 2-[2-[[(2S)-2-[5-[5-[3-Acetamido-4,5-diacetoxy-6-(acetoxymethyl)tetrahydropyran-2-yl]oxypentanoylamino]pentanoylamino]-5-[bis[2-[5-[5-[3-acetamido-4,5-diacetoxy-6-(acetoxymethyl)tetrahydropyran-2-yl]oxypentanoylamino]pentanoylamino]ethyl]amino]-5-oxo-pentanoyl]amino]ethoxy]acetic Acid

[chemical structure]

[0111] Benzyl 2-[2-[[(2S)-2-[5-[5-[3-acetamido-4,5-diacetoxy-6-(acetoxymethyl)tetrahydropyran-2-yl]oxypentanoylamino]pentanoylamino]-5-[bis[2-[5-[5-[3-acetamido-4,5-diacetoxy-6-(acetoxymethyl)tetrahydropyran-2-yl]oxypentanoylamino]pentanoylamino]ethyl]amino]-5-oxo-pentanoyl]amino]ethoxy]acetate (0.120 mmol, 240 mg) is combined with 5% Pd/C (1.17 mmol, 124 mg) in MeOH (12.0 ml). The mixture is hydrogenated on a Parr shaker (ambient temperature, 10 psi) for 48 minutes, filtered through diatomaceous earth, and concentrated in vacuo to give the title compound as a gray solid (187 mg, 82%). ES/MS m/z 960.0 (M+2H/2).

### Preparation 39

### (2,3,5,6-Tetrafluorophenyl) 2-[2-[[(2S)-2-[5-[5-[3-acetamido-4,5-diacetoxy-6-(acetoxymethyl)tetrahydropyran-2-yl]oxypentanoylamino]pentanoylamino]-5-[bis[2-[5-[5-[3-acetamido-4,5-diacetoxy-6-(acetoxymethyl)tetrahydropyran-2-yl]oxypentanoylamino]pentanoylamino]ethyl]amino]-5-oxo-pentanoyl]amino]ethoxy]acetate

[chemical structure]

[0112] To 2-[2-[[(2S)-2-[5-[5-[3-acetamido-4,5-diacetoxy-6-(acetoxymethyl)tetrahydropyran-2-yl]oxypentanoylamino]pentanoylamino]-5-[bis[2-[5-[5-[3-acetamido-4,5-diacetoxy-6-(acetoxymethyl)tetrahydropyran-2-yl]oxypentanoylamino]pentanoylamino]ethyl]amino]-5-oxo-pentanoyl]amino]ethoxy]acetic acid (0.096 mmol, 184 mg) and DIEA (0.765 mmol, 140 μL) in DCM (3.0 ml) is added (2,3,5,6-tetrafluorophenyl) 2,2,2-trifluoroacetate (0.383 mmol, 100 mg) to the mixture dropwise. The mixture is stirred at ambient temperature for 16 hours. The reaction mixture is purified directly by silica gel flash chromatography eluting with 0% to 50% MeOH/DCM to give the title compound as a tan solid (197 mg, 99%). ES/MS m/z 1034.0 (M+2H/2).

### Preparation 40

### Benzyl 2-[2-[2-[2-[[(2S)-2-[5-[5-[3-acetamido-4,5-diacetoxy-6-(acetoxymethyl)tetrahydropyran-2-yl]oxypentanoylamino]pentanoylamino]-5-[bis[2-[5-[5-[3-acetamido-4,5-diacetoxy-6-(acetoxymethyl)tetrahydropyran-2-yl]oxypentanoylamino]pentanoylamino]ethyl]amino]-5-oxo-pentanoyl]amino]ethoxy]ethoxy]ethoxy]acetate

[chemical structure]

[0113] The title compound is prepared from (2S)-2-[5-[5-[3-acetamido-4,5-diacetoxy-6-(acetoxymethyl)tetrahydropyran-2-yl]oxypentanoylamino]pentanoylamino]-5-[bis[2-[5-[5-[3-acetamido-4,5-diacetoxy-6-(acetoxymethyl)tetrahydropyran-2-yl]oxypentanoylamino]pentanoylamino]ethyl]amino]-5-oxo-pentanoic acid and benzyl 2-[2-[2-(2-aminoethoxy) ethoxy]ethoxy]acetate hydrochloride in a manner essentially analogous to the method of preparation 10. ES/MS m/z 1049.0 (M+2H/2).

### Preparation 41

### 2-[2-[2-[2-[[(2S)-2-[5-[5-[3-Acetamido-4,5-diacetoxy-6-(acetoxymethyl)tetrahydropyran-2-yl]oxypentanoylamino]pentanoylamino]-5-[bis[2-[5-[5-[3-acetamido-4,5-diacetoxy-6-(acetoxymethyl)tetrahydropyran-2-yl]oxypentanoylamino]pentanoylamino]ethyl]amino]-5-oxo-pentanoyl]amino]ethoxy]ethoxy]ethoxy]acetic Acid

[chemical structure]

[0114] Benzyl 2-[2-[2-[2-[[(2S)-2-[5-[5-[3-acetamido-4,5-diacetoxy-6-(acetoxymethyl)tetrahydropyran-2-yl]oxypentanoylamino]pentanoylamino]-5-[bis[2-[5-[5-[3-acetamido-4,5-diacetoxy-6-(acetoxymethyl)tetrahydropyran-2-yl]oxypentanoylamino]pentanoylamino]ethyl]amino]-5-oxo-pentanoyl]amino]ethoxy]ethoxy]ethoxy]acetate (0.118 mmol, 247 mg) is combined with 5% Pd/C (1.17 mmol, 124 mg) in MeOH (12.0 mL). The mixture is hydrogenated on a Parr shaker (ambient temperature, 10 psi) for 1 hour, filtered through diatomaceous earth, and concentrated in vacuo to give the title compound as a gray solid (227 mg, 96%). ES/MS m/z 1004.0 (M+2H/2).

### Preparation 42

### (2,3,5,6-Tetrafluorophenyl) 2-[2-[2-[2-[[(2S)-2-[5-[5-[3-acetamido-4,5-diacetoxy-6-(acetoxymethyl)tetrahydropyran-2-yl]oxypentanoylamino]pentanoylamino]-5-[bis[2-[5-[5-[3-acetamido-4,5-diacetoxy-6-(acetoxymethyl)tetrahydropyran-2-yl]oxypentanoylamino]pentanoylamino]ethyl]amino]-5-oxo-pentanoyl]amino]ethoxy]ethoxy]ethoxy]acetate

[chemical structure]

[0115] To 2-[2-[2-[2-[[(2S)-2-[5-[5-[3-Acetamido-4,5-diacetoxy-6-(acetoxymethyl)tetrahydropyran-2-yl]oxypentanoylamino]pentanoylamino]-5-[bis[2-[5-[5-[3-acetamido-4,5-diacetoxy-6-(acetoxymethyl)tetrahydropyran-2-yl]oxypentanoylamino]pentanoylamino]ethyl]amino]-5-oxo-pentanoyl]amino]ethoxy]ethoxy]ethoxy]acetic acid (0.111 mmol, 222 mg) and DIEA (0.883 mmol, 154 μL) in DCM (3.0 ml) is added (2,3,5,6-tetrafluorophenyl) 2,2,2-trifluoroacetate (0.443 mmol, 116 mg) to the mixture dropwise. The mixture is stirred at ambient temperature for 16 hours. The reaction mixture is purified directly by silica gel flash chromatography eluting with 0% to 50% MeOH/DCM to give the title compound as a tan solid (174 mg, 73%). ES/MS m/z 1078.2 (M+2H/2).

### Example 1: Conjugation Protocol

[0116] For the synthesis of GalNAc-conjugated sense strands, a sense strand with a 3′ C6-NH₂ functional group was first synthesized using standard phosphoramidite chemistry. A stock solution of GalNAc ligand-NHS ester (10 mmol/L in acetonitrile; 1 eq) was prepared. Borate buffer (10% v/v; 20×) was added to oligonucleotide C6-NH₂ sense strand in an Eppendorf tube, then GalNAc ligand (5 eq) was added. The mixture was shaken at ambient temperature for 16 hours. After this time, the mixture was transferred to a 15 mL falcon tube, ammonium hydroxide (28 mass %) was added, and the mixture was shaken at ambient temperature for 2 hours. The ammonia was then removed in vacuo. The residue was purified by ion-exchange chromatography. Conditions: Solvent A: 15% MeCN/20 mM NaH₂PO₄, Solvent B: 15% MeCN/20 mM NaH₂PO₄, 1M NaBr; 35-55% B over 5 CV at 8 mL/min, column temperature 60° C. The desired fractions were pooled and desalted by spin-filtration using an Eppendorf centrifuge or desalting column. After desalting, the material was recovered and OD and volume were measured to obtain concentration.

[0117] Alternatively, conjugation to the 5′ position of the sense strand through immobilizing the GalNAc ligand on microporous polystyrene resin or controlled pore glass and synthesized using established solid phase oligonucleotide synthesis methods with 5′-CE ß-cyanoethyl) phosphoramidites.

[0118] Alternatively, the GalNAc ligand was converted to a suitable phosphoramidite and delivered to the 5′ position of the sense strand using standard phosphoramidite chemistry.

### Example 2: Annealing

[0119] To generate the siRNA duplexes of a sense and antisense strand, the following procedures were performed. To a falcon tube containing oligonucleotide sense strand-GalNAc conjugate, the corresponding antisense oligonucleotide (1 eq) was added and vortexed for 10 seconds before spin-filtering through 100K MWCO Amicon filter unit to remove particulates. The filtrate was recovered and concentrated in vacuo on a Genevac evaporator. The residue was reconstituted in 1×PBS, filtered through 0.2μ filter, and OD and volume were measured to obtain concentration.

[0120] An endotoxin test was performed using a Limulus amebocyte lysate on an Endosafe®-nexgen PTS instrument.

TABLE 1
Exemplary molecules synthesized utilizing the aforementioned conjugation and annealing protocols.

| Molecule | |
|---|---|
| Identifier | Ligand attached to 3′ of sense strand |
| 1 | [chemical structure] |
| 2 | [chemical structure] |
| 3 | [chemical structure] |
| 4 | [chemical structure] |
| 5 | [chemical structure] |
| 6 | [chemical structure] |

### Example 3

### General Procedure for Oligo Synthesis Using GalNAc-Functionalized CPG

[0121] Oligo synthesis was conducted on a MerMade™ 12 instrument using phosphoramidite chemistry. Sense strands were synthesized from the prefunctionalized GalNAc solid support and antisense strands were synthesized using standard support preloaded with the first nucleotide of the oligo sequence. Oligos were cleaved and deprotected using concentrated ammonium hydroxide solution (28% by mass) and purified by ion exchange chromatography using conditions described above. Desalting, annealing, and endotoxin testing were conducted.

[0122] The sequence of antisense oligonucleotides were designed using 15 to 50 nucleotides of the antisense strands described herein, including those in Table 2A, 2B and Table 3A, 3B.

[0123] Exemplary antisense strand sequences of 23 nucleotides in length are shown in Table 2A and 2B below, which may be optionally further modified and synthesized and incorporated into the RNAi agents, as described herein.

TABLE 2A
Modified ANGPTL8 Sequences for GalNAc-RNAi Agents

| Duplex | | | Sequence (5′ to 3′ for each sense strand |
|---|---|---|---|
| NO: | SEQ ID NO: | | (SS) and antisense strand (AS)) |
| D:1 | SEQ ID NO: 1 | SS: | mA*mG*mCmAmGmCmAmUfCfGfGmCmUmGmCmGmAmCmA*mG*mA |
| | SEQ ID NO: 6 | AS: | [Phos]mU*fC*mUmGfUmCfGmCmAmGmCmCmGfAmUfGmCmUmGmCmU*mG*mU |
| D:2 | SEQ ID NO: 2 | SS: | mG*mG*mAmGmCmUmGmAfCfCfCmUmGmCmUmCmUmUmC*mC*mA |
| | SEQ ID NO: 7 | AS: | [Phos]mU*fG*mGmAfAmGfAmGmCmAmGmGmGfUmCfAmGmCmUmCmC*mU*mC |
| D:3 | SEQ ID NO: 3 | SS: | mG*mA*mCmUmCmAmGmAfUfGfGmAmGmGmAmGmGmAmU*mA*mU |
| | SEQ ID NO: 8 | AS: | [Phos]mA*fU*mAmUfCmCfUmCmCmUmCmCmAfUmCfUmGmAmGmUmC*mU*mC |
| D:4 | SEQ ID NO: 4 | SS: | mC*mU*mUmAmAmAmGmGfCfUfCmAmCmGmCmUmGmAmC*mA*mA |
| | SEQ ID NO: 9 | AS: | [Phos]mU*fU*mGmUfCmAfGmCmGmUmGmAmGfCmCfUmUmUmAmAmG*mA*mC |
| D:5 | SEQ ID NO: 5 | SS: | mA*mA*mGmCmCmUmGmUfUfGfGmAmGmAmCmUmCmAmG*mA*mU |
| | SEQ ID NO: 10 | AS: | [Phos]mA*fU*mCmUfGmAfGmUmCmUmCmCmAfAmCfAmGmGmCmUmU*mG*mC |

TABLE 2B
Modified ANGPTL8 Sequences for GalNAc-RNAi Agents

| Duplex | | Sequence (5′ to 3′ for each sense strand |
|---|---|---|
| NO: | SEQ ID NO: | (SS) and antisense strand (AS)) |
| D:104 | SEQ ID NO: 1 | mA*mG*mCmAmGmCmAmUfCfGfGmCmUmGmCmGmAmCmA*mG*mA |
| | SEQ ID NO: 11 | mU*fC*mUmGfUmCfGmCmAmGmCmCmGfAmUfGmCmUmGmCmU*mG*mU |
| D:105 | SEQ ID NO: 2 | mG*mG*mAmGmCmUmGmAfCfCfCmUmGmCmUmCmUmUmC*mC*mA |
| | SEQ ID NO: 12 | mU*fG*mGmAfAmGfAmGmCmAmGmGmGfUmCfAmGmCmUmCmC*mU*mC |
| D:106 | SEQ ID NO: 3 | mG*mA*mCmUmCmAmGmAfUfGfGmAmGmGmAmGmGmAmU*mA*mU |
| | SEQ ID NO: 13 | mA*fU*mAmUfCmCfUmCmCmUmCmCmAfUmCfUmGmAmGmUmC*mU*mC |
| D:107 | SEQ ID NO: 4 | mC*mU*mUmAmAmAmGmGfCfUfCmAmCmGmCmUmGmAmC*mA*mA |
| | SEQ ID NO: 14 | mU*fU*mGmUfCmAfGmCmGmUmGmAmGfCmCfUmUmUmAmAmG*mA*mC |
| D:108 | SEQ ID NO: 5 | mA*mA*mGmCmCmUmGmUfUfGfGmAmGmAmCmUmCmAmG*mA*mU |
| | SEQ ID NO: 15 | mA*fU*mCmUfGmAfGmUmCmUmCmCmAfAmCfAmGmGmCmUmU*mG*mC |

TABLE 3A
Modified sense and antisense strands for the GalNAc-ANGPTL8

| RNAi | | |
|---|---|---|
| Agents | | |
| herein | | Sequence (5′ to 3′ for each sense strand (SS) |
| Duplex NO: | SEQ ID NO: | and antisense strand (AS)) |
| D:6 | SEQ ID NO: 16 | mU*mC*mGmGmGmCmAmAfGfCfCmUmGmUmUmGmGmAmG*mA*mA |
| | SEQ ID NO: 113 | Phos mU*fU*mCmUfCmCfAmAmCmAmGmGmCfUmUfGmCmCmCmGmA*mA*mG |
| D:7 | SEQ ID NO: 17 | mA*mA*mUmCmUmGmCmCfUfGfGmAmUmGmGmAmAmCmU*mG*mA |
| | SEQ ID NO: 114 | Phos mU*fC*mAmGfUmUfCmCmAmUmCmCmAfGmGfCmAmGmAmUmU*mC*mA |
| D:8 | SEQ ID NO: 18 | mC*mC*mUmGmGmAmUmGfGfAfAmCmUmGmAmGmGmAmC*mC*mA |
| | SEQ ID NO: 115 | Phos mU*fG*mGmUfCmCfUmCmAmGmUmUmCfCmAfUmCmCmAmGmG*mC*mA |
| D:9 | SEQ ID NO: 19 | mU*mU*mAmAmAmGmCmAfGfAfGmUmCmGmUmGmGmCmA*mU*mA |
| | SEQ ID NO: 116 | Phos mU*fA*mUmGfCmCfAmCmGmAmCmUmCfUmGfCmUmUmUmAmA*mU*mG |
| D:10 | SEQ ID NO: 20 | mU*mG*mCmGmAmCmAmGfAfUfCmCmAmGmGmAmGmAmG*mA*mA |
| | SEQ ID NO: 117 | Phos mU*fU*mCmUfCmUfCmCmUmGmGmAmUfCmUfGmUmCmGmCmA*mG*mC |
| D:11 | SEQ ID NO: 21 | mU*mG*mAmAmUmCmUmGfCfCfUmGmGmAmUmGmGmAmA*mC*mA |
| | SEQ ID NO: 118 | Phos mU*fG*mUmUfCmCfAmUmCmCmAmGmGfCmAfGmAmUmUmCmA*mG*mG |
| D:12 | SEQ ID NO: 22 | mG*mA*mGmCmUmGmCmCfUfGfUmUmCmAmCmUmGmGmG*mA*mA |
| | SEQ ID NO: 119 | Phos mU*fU*mCmCfCmAfGmUmGmAmAmCmAfGmGfCmAmGmCmUmC*mC*mU |
| D:13 | SEQ ID NO: 23 | mA*mG*mGmUmCmUmUmAfAfAfGmGmCmUmCmAmCmGmC*mU*mA |
| | SEQ ID NO: 120 | Phos mU*fAmGmCfGmUfGmAmGmCmCmUmUfUmAfAmGmAmCmCmU*mC*mA |
| D:14 | SEQ ID NO: 24 | mU*mC*mAmCmUmGmGmGfAfUfCmAmGmCmCmAmGmGmG*mC*mA |
| | SEQ ID NO: 121 | Phos mU*fG*mCmCfCmUfGmGmCmUmGmAmUfCmCfCmAmGmUmGmA*mA*mC |
| D:15 | SEQ ID NO: 25 | mU*mC*mAmUmUmAmAmAfGfCfAmGmAmGmUmCmGmUmG*mG*mA |
| | SEQ ID NO: 122 | Phos mU*fC*mCmAfCmGfAmCmUmCmUmGmCfUmUfUmAmAmUmGmA*mG*mG |
| D:16 | SEQ ID NO: 26 | mG*mA*mAmCmAmGmCmCfUfGfGmGmUmCmUmCmUmAmU*mG*mA |
| | SEQ ID NO: 123 | Phos mU*fC*mAmUfAmGfAmGmAmCmCmCmAfGmGfCmUmGmUmUmC*mC*mU |
| D:17 | SEQ ID NO: 27 | mG*mG*mGmGmCmAmGmGfAfGfGmUmCmAmGmCmCmGmG*mG*mA |
| | SEQ ID NO: 124 | Phos mU*fC*mCmCfGmGfCmUmGmAmCmCmUfCmCfUmGmCmCmCmC*mA*mG |
| D:18 | SEQ ID NO: 28 | mA*mG*mCmGmGmCmUmAfGfAfAmGmUmCmCmAmGmCmU*mG*mA |
| | SEQ ID NO: 125 | Phos mU*fC*mAmGfCmUfGmGmAmCmUmUmCfUmAfGmCmCmGmCmU*mG*mC |
| D:19 | SEQ ID NO: 29 | mG*mA*mGmAmUmGmGmUfGfGfCmAmCmAmGmCmAmGmC*mA*mA |
| | SEQ ID NO: 126 | Phos mU*fU*mGmCfUmGfCmUmGmUmGmCmCfAmCfCmAmUmCmUmC*mC*mC |
| D:20 | SEQ ID NO: 30 | mG*mG*mCmUmGmAmCmAfAfAfGmGmCmCmAmGmGmAmA*mC*mA |
| | SEQ ID NO: 127 | Phos mU*fG*mUmUfCmCfUmGmGmCmCmUmUfUmGfUmCmAmGmCmC*mG*mU |
| D:21 | SEQ ID NO: 31 | mG*mU*mCmCmAmGmCmUfGfAfGmGmAmGmCmGmCmCmU*mG*mA |
| | SEQ ID NO: 128 | Phos mU*fC*mAmGfGmCfGmCmUmCmCmUmCfAmGfCmUmGmGmAmC*mU*mU |
| D:22 | SEQ ID NO: 32 | mC*mA*mUmUmAmAmAmGfCfAfGmAmGmUmCmGmUmGmG*mC*mA |
| | SEQ ID NO: 129 | Phos mU*fG*mCmCfAmCfGmAmCmUmCmUmGfCmUfUmUmAmAmUmG*mA*mG |
| D:23 | SEQ ID NO: 33 | mU*mC*mCmCmAmGmCmCfUfGfAmAmUmCmUmGmCmCmU*mG*mA |
| | SEQ ID NO: 130 | Phos mU*fC*mAmGfGmCfAmGmAmUmUmCmAfGmGfCmUmGmGmGmA*mG*mC |
| D:24 | SEQ ID NO: 34 | mG*mG*mAmUmGmCmAmGfCfCfCmAmGmGmAmAmCmUmU*mC*mA |
| | SEQ ID NO: 131 | Phos mU*fG*mAmAfGmUfUmCmCmUmGmGmGfCmUfGmCmAmUmCmC*mC*mG |
| D:25 | SEQ ID NO: 35 | mG*mC*mUmAmGmAmAmGfUfCfCmAmGmCmUmGmAmGmG*mA*mA |
| | SEQ ID NO: 132 | Phos mU*fU*mCmCfUmCfAmGmCmUmGmGmAfCmUfUmCmUmAmGmC*mC*mG |
| D:26 | SEQ ID NO: 36 | mC*mA*mCmAmGmCmAmGfCfAfUmCmGmGmCmUmGmCmG*mA*mA |
| | SEQ ID NO: 133 | Phos mU*fU*mCmGfCmAfGmCmCmGmAmUmGfCmUfGmCmUmGmUmG*mC*mC |
| D:27 | SEQ ID NO: 37 | mG*mG*mAmAmCmUmUmCfGfGfGmCmAmAmGmCmCmUmG*mU*mA |
| | SEQ ID NO: 134 | Phos mU*fA*mCmAfGmGfCmUmUmGmCmCmCfGmAfAmGmUmUmCmC*mU*mG |
| D:28 | SEQ ID NO: 38 | mA*mC*mUmGmGmGmAmUfCfAfGmCmCmAmGmGmGmCmG*mC*mA |
| | SEQ ID NO: 135 | Phos mU*fG*mCmGfCmCfCmUmGmGmCmUmGfAmUfCmCmCmAmGmU*mG*mA |
| D:29 | SEQ ID NO: 39 | mA*mG*mAmAmGmUmCmCfAfGfCmUmGmAmGmGmAmGmC*mG*mA |
| | SEQ ID NO: 136 | Phos mU*fC*mGmCfUmCfCmUmCmAmGmCmUfGmGfAmCmUmUmCmU*mA*mG |
| D:30 | SEQ ID NO: 40 | mG*mC*mAmUmCmGmGmCfUffCmGmAmCmAmGmAmUmC*mC*mA |
| | SEQ ID NO: 137 | Phos mU*fG*mGmAfUmCfUmGmUmCmGmCmAfGmCfCmGmAmUmGmC*mU*mG |
| D:31 | SEQ ID NO: 41 | mA*mG*mAmUmGmGmUmGfGfCfAmCmAmGmCmAmGmCmA*mU*mA |
| | SEQ ID NO: 138 | Phos mU*fA*mUmGfCmUfGmCmUmGmUmGmCfCmAfCmCmAmUmCmU*mC*mC |
| D:32 | SEQ ID NO: 42 | mG*mG*mUmGmGmCmAmCfAfGfCmAmGmCmAmUmCmGmG*mC*mA |
| | SEQ ID NO: 139 | Phos mU*fG*mCmCfGmAfUmGmCmUmGmCmUfGmUfGmCmCmAmCmC*mA*mU |
| D:33 | SEQ ID NO: 43 | mA*mC*mAmGmCmAmGmCfAfUfCmGmGmCmUmGmCmGmA*mC*mA |
| | SEQ ID NO: 140 | Phos mU*fG*mUmCfGmCfAmGmCmCmGmAmUfGmCfUmGmCmUmGmU*mG*mC |
| D:34 | SEQ ID NO: 44 | mA*mA*mGmGmCmUmCmAfCfGfCmUmGmAmCmAmAmGmC*mA*mA |
| | SEQ ID NO: 141 | Phos mU*fU*mGmCfUmUfGmUmCmAmGmCmGfUmGfAmGmCmCmUmU*mU*mA |
| D:35 | SEQ ID NO: 45 | mA*mG*mCmCmUmGmAmAfUfCfUmGmCmCmUmGmGmAmU*mG*mA |
| | SEQ ID NO: 142 | Phos mU*fC*mAmUfCmCfAmGmGmCmAmGmAfUmUfCmAmGmGmCmU*mG*mG |
| D:36 | SEQ ID NO: 46 | mA*mU*mCmGmGmCmUmGfCfGfAmCmAmGmAmUmCmCmA*mG*mA |
| | SEQ ID NO: 143 | Phos mU*fC*mUmGfGmAfUmCmUmGmUmCmGfCmAfGmCmCmGmAmU*mG*mC |
| D:37 | SEQ ID NO: 47 | mA*mG*mUmCmCmAmGmCfUfGfAmGmGmAmGmCmGmCmC*mU*mA |
| | SEQ ID NO: 144 | Phos mU*fA*mGmGfCmGfCmUmCmCmUmCmAfGmCfUmGmGmAmCmU*mU*mC |
| D:38 | SEQ ID NO: 48 | mC*mG*mGmCmAmGmAmGfGfCfGmGmGmAmGmAmUmGmG*mU*mA |
| | SEQ ID NO: 145 | Phos mU*fA*mCmCfAmUfCmUmCmCmCmGmCfCmUfCmUmGmCmCmG*mC*mU |
| D:39 | SEQ ID NO: 49 | mA*mU*mGmCmUmGmCmAfAfGfGmAmAmCmAmCmUmUmC*mC*mA |
| | SEQ ID NO: 146 | Phos mU*fG*mGmAfAmGfUmGmUmUmCmCmUfUmGfCmAmGmCmAmU*mG*mA |
| D:40 | SEQ ID NO: 50 | mC*mU*mUmCmGmGmGmCfAfAfGmCmCmUmGmUmUmGmG*mA*mA |
| | SEQ ID NO: 147 | Phos mU*fU*mCmCfAmAfCmAmGmGmCmUmUfGmCfCmCmGmAmAmG*mU*mU |
| D:41 | SEQ ID NO: 51 | mG*mG*mAmGmCmUmGmCfCfUfGmUmUmCmAmCmUmGmG*mG*mA |
| | SEQ ID NO: 148 | Phos mU*fC*mCmCfAmGfUmGmAmAmCmAmGfGmCfAmGmCmUmCmC*mU*mC |
| D:42 | SEQ ID NO: 52 | mG*mC*mCmUmGmGmAmUfGfGfAmAmCmUmGmAmGmGmA*mC*mA |
| | SEQ ID NO: 149 | Phos mU*fG*mUmCfCmUfCmAmGmUmUmCmCfAmUfCmCmAmGmGmC*mA*mG |
| D:43 | SEQ ID NO: 53 | mC*mA*mAmGmGmAmAmCfAfCfUmUmCmCmAmCmGmCmC*mC*mA |
| | SEQ ID NO: 150 | Phos mU*fG*mGmGfCmGfUmGmGmAmAmGmUfGmUfUmCmCmUmUmG*mC*mA |
| D:45 | SEQ ID NO: 54 | mG*mG*mCmUmAmGmAmAfGfUfCmCmAmGmCmUmGmAmG*mG*mA |
| | SEQ ID NO: 151 | Phos mU*fC*mCmUfCmAfGmCmUmGmGmAmCfUmUfCmUmAmGmCmC*mG*mC |
| D:46 | SEQ ID NO: 55 | mU*mG*mAmGmGmUmCmUfUfAfAmAmGmGmCmUmCmAmC*mG*mA |
| | SEQ ID NO: 152 | Phos mU*fC*mGmUfGmAfGmCmCmUmUmUmAfAmGfAmCmCmUmCmA*mA*mA |
| D:47 | SEQ ID NO: 56 | mG*mG*mGmCmAmAmGmCfCfUfGmUmUmGmGmAmGmAmC*mU*mA |
| | SEQ ID NO: 153 | Phos mU*fA*mGmUfCmUfCmCmAmAmCmAmGfGmCfUmUmGmCmCmC*mG*mA |
| D:48 | SEQ ID NO: 57 | mG*mC*mGmGmCmUmAmGfAfAfGmUmCmCmAmGmCmUmG*mA*mA |
| | SEQ ID NO: 154 | Phos mU*fU*mCmAfGmCfUmGmGmAmCmUmUfCmUfAmGmCmCmGmC*mU*mG |
| D:49 | SEQ ID NO: 58 | mU*mG*mGmCmAmCmAmGfCfAfGmCmAmUmCmGmGmCmU*mG*mA |
| | SEQ ID NO: 155 | Phos mU*fC*mAmGfCmCfGmAmUmGmCmUmGfCmUfGmUmGmCmCmA*mC*mC |
| D:50 | SEQ ID NO: 59 | mA*mU*mGmGmUmGmGmCfAfCfAmGmCmAmGmCmAmUmC*mG*mA |
| | SEQ ID NO: 156 | Phos mU*fC*mGmAfUmGfCmUmGmCmUmGmUfGmCfCmAmCmCmAmU*m*mU |
| D:51 | SEQ ID NO: 60 | mA*mG*mAmAmUmUmUmGfAfGfGmUmCmUmUmAmAmAmG*mG*mA |
| | SEQ ID NO: 157 | Phos mU*fC*mCmUfUmUfAmAmGmAmCmCmUfCmAfAmAmUmUmCmU*mC*mG |
| D:52 | SEQ ID NO: 61 | mG*mG*mAmAmCmAmGmCfCfUfGmGmGmUmCmUmCmUmA*mU*mA |
| | SEQ ID NO: 158 | Phos mU*fA*mUmAfGmAfGmAmCmCmCmAmGfGmCfUmGmUmUmCmC*mU*mG |
| D:53 | SEQ ID NO: 62 | mA+mG*mGmCmUmCmAmCfGfCfUmGmAmCmAmAmGmCmA*mG*mA |
| | SEQ ID NO: 159 | Phos mU*fC*mUmGfCmUfUmGmUmCmAmGmCfGmUfGmAmGmCmCmU*mU*mU |
| D:54 | SEQ ID NO: 63 | mG*mG*mCmAmCmAmGmCfAfGfCmAmUmCmGmGmCmUmG*mC*mA |
| | SEQ ID NO: 160 | Phos mU*fG*mCmAfGmCfCmGmAmUmGmCmUfGmCfUmGmUmGmCmC*mA*mC |
| D:55 | SEQ ID NO: 64 | mC*mG*mGmGmCmAmAmGfCfCfUmGmUmUmGmGmAmGmA*mC*mA |
| | SEQ ID NO: 161 | Phos mU*fG*mUmCfUmCfCmAmAmCmAmGmGfCmUfUmGmCmCmCmG*mA*mA |
| D:56 | SEQ ID NO: 65 | mA*mA*mAmGmGmCmUmCfAfCfGmCmUmGmAmCmAmAmG*mC*mA |
| | SEQ ID NO: 162 | Phos mU*fG*mCmUfUmGfUmCmAmGmCmGmUfGmAfGmCmCmUmUmU*mA*mA |
| D:57 | SEQ ID NO: 66 | mG*mA*mAmUmCmUmGmCfCfUfGmGmAmUmGmGmAmAmC*mU*mA |
| | SEQ ID NO: 163 | Phos mU*fA*mGmUfUmCfCmAmUmCmCmAmGfGmCfAmGmAmUmUmC*mA*mG |
| D:58 | SEQ ID NO: 67 | mC*mC*mUmGmUmUmCmAfCfUfGmGmGmAmUmCmAmGmC*mC*mA |
| | SEQ ID NO: 164 | Phos mU*fG*mGmCfUmGfAmUmCmCmCmAmGfUmGfAmAmCmAmGmG*mC*mA |
| D:59 | SEQ ID NO: 68 | mA*mU*mUmAmAmAmGmCfAfGfAmGmUmCmGmUmGmGmC*mA*mA |
| | SEQ ID NO: 165 | Phos mU*fU*mGmCfCmAfCmGmAmCmUmCmUfGmCfUmUmUmAmAmU*mG*mA |
| D:60 | SEQ ID NO: 69 | mU*mG*mGmUmGmGmCmAfCfAfGmCmAmGmCmAmUmCmG*mG*mA |
| | SEQ ID NO: 166 | Phos mU*fC*mCmGfAmUfGmCmUmGmCmUmGfUmGfCmCmAmCmCmA*mU*mC |
| D:61 | SEQ ID NO: 70 | mA*mG*mGmAmGmGmAmUfAfUfUmCmUmGmCmAmGmCmU*mG*mA |
| | SEQ ID NO: 167 | Phos mU*fC*mAmGfCmUfGmCmAmGmAmAmUfAmUfCmCmUmCmCmU*mC*mC |
| D:62 | SEQ ID NO: 71 | mU*mU*mGmAmGmGmUmCfUfUfAmAmAmGmGmCmUmCmA*mC*mA |
| | SEQ ID NO: 168 | Phos mU*fG*mUmGfAmGfCmCmUmUmUmAmAfGmAfCmCmUmCmAmA*mA*mU |
| D:63 | SEQ ID NO: 72 | mG*mC*mCmCmAmGmGmAfAfCfUmUmCmGmGmGmCmAmA*mG*mA |
| | SEQ ID NO: 169 | Phos mU*fC*mUmUfGmCfCmCmGmAmAmGmUfUmCfCmUmGmGmGmC*mU*mG |
| D:64 | SEQ ID NO: 73 | mU*mA*mGmAmAmGmUmCfCfAfGmCmUmGmAmGmGmAmG*mC*mA |
| | SEQ ID NO: 170 | Phos mU*fG*mCmUfCmCfUmCmAmGmCmUmGfGmAfCmUmUmCmUmA*mG*mC |
| D:65 | SEQ ID NO: 74 | mC*mU*mGmCmCmUmGmUfUfCfAmCmUmGmGmGmAmUmC*mA*mA |
| | SEQ ID NO: 171 | Phos mU*fU*mGmAfUmCfCmCmAmGmUmGmAfAmCfAmGmGmCmAmG*mC*mU |
| D:66 | SEQ ID NO: 75 | mU*mC*mUmGmCmCmUmGfGfAfUmGmGmAmAmCmUmGmA*mG*mA |
| | SEQ ID NO: 172 | Phos mU*fC*mUmCfAmGfUmUmCmCmAmUmCfCmAfGmGmCmAmGmA*mU*mU |
| D:67 | SEQ ID NO: 76 | mC*mA*mCmGmCmUmGmAfCfAfAmGmCmAmGmAmGmCmC*mA*mA |
| | SEQ ID NO: 173 | Phos mU*fU*mGmGfCmUfCmUmGmCmUmUmGfUmCfAmGmCmGmUmG*mA*mG |
| D:68 | SEQ ID NO: 77 | mU*mG*mCmCmUmGmGmAfUfGfGmAmAmCmUmGmAmGmG*mA*mA |
| | SEQ ID NO: 174 | Phos mU*fU*mCmCfUmCfAmGmUmUmCmCmAfUmCfCmAmGmGmCmA*mG*mA |
| D:69 | SEQ ID NO: 78 | mG*mA*mUmGmGmUmGmGfCfAfCmAmGmCmAmGmCmAmU*mC*mA |
| | SEQ ID NO: 175 | Phos mU*fG*mAmUfGmCfUmGmCmUmGmUmGfCmCfAmCmCmAmUmC*mU*mC |
| D:70 | SEQ ID NO: 79 | mG*mU*mCmUmUmAmAmAfGfGfCmUmCmAmCmGmCmUmG*mA*mA |
| | SEQ ID NO: 176 | Phos mU*fU*mCmAfGmCfGmUmGmAmGmCmCfUmUfUmAmAmGmAmC*mC*mU |
| D:71 | SEQ ID NO: 80 | mG*mA*mUmGmCmAmGmCfCfCfAmGmGmAmAmCmUmUmC*mG*mA |
| | SEQ ID NO: 177 | Phos mU*fC*mGmAfAmGfUmUmCmCmUmGmGfGmCfUmGmCmAmUmC*mC*mC |
| D:72 | SEQ ID NO: 81 | mG*mA*mGmAmAmUmUmUfGfAfGmGmUmCmUmUmAmAmA*mG*mA |
| | SEQ ID NO: 178 | Phos mU*fC*mUmUfUmAfAmGmAmCmCmUmCfAmAfAmUmUmCmUmC*mG*mG |
| D:73 | SEQ ID NO: 82 | mG*mA*mUmGmGmAmGmGfAfGfGmAmUmAmUmUmCmUmG*mC*mA |
| | SEQ ID NO: 179 | Phos mU*fG*mCmAfGmAfAmUmAmUmCmCmUfCmCfUmCmCmAmUmC*mU*mG |
| D:74 | SEQ ID NO: 83 | mU*mG*mAmCmAmAmAmGfGfCfCmAmGmGmAmAmCmAmG*mC*mA |
| | SEQ ID NO: 180 | Phos mU*fG*mCmUfGmUfUmCmCmUmGmGmCfCmUfUmUmGmUmCmA*mG*mC |
| D:75 | SEQ ID NO: 84 | mC*mU*mCmAmCmGmCmUfGfAfCmAmAmGmCmAmGmAmG*mC*mA |
| | SEQ ID NO: 181 | Phos mU*fG*mCmUfCmUfGmCmUmUmGmUmCfAmGfCmGmUmGmAmG*mC*mC |
| D:76 | SEQ ID NO: 85 | mG*mC*mCmUmGmAmAmUfCfUfGmCmCmUmGmGmAmUmG*mG*mA |
| | SEQ ID NO: 182 | Phos mU*fC*mCmAfUmCfCmAmGmGmCmAmGfAmUfUmCmAmGmGmC*mU*mG |
| D:77 | SEQ ID NO: 86 | mA*mC*mAmGmCmCmUmGfGfGfUmCmUmCmUmAmUmGmG*mC*mA |
| | SEQ ID NO: 183 | Phos mU*fG*mCmCfAmUfAmGmAmGmAmCmCfCmAfGmGmCmUmGmU*mU*mC |
| D:78 | SEQ ID NO: 87 | mC*mA*mGmGmAmAmCmUfUfCfGmGmGmCmAmAmGmCmC*mU*mA |
| | SEQ ID NO: 184 | Phos mU*fA*mGmGfCmUfUmGmCmCmCmGmAfAmGfUmUmCmCmUmG*mG*mG |
| D:79 | SEQ ID NO: 88 | mG*mC*mAmAmGmGmAmAfCfAfCmUmUmCmCmAmCmGmC*mC*mA |
| | SEQ ID NO: 185 | Phos mU*fG*mGmCfGmUfGmGmAmAmGmUmGfUmUfCmCmUmUmGmC*mA*mG |
| D:80 | SEQ ID NO: 89 | mU*mU*mUmGmAmGmGmUfCfUfUmAmAmAmGmGmCmUmC*mA*mA |
| | SEQ ID NO: 186 | Phos mU*fU*mGmAfGmCfCmUmUmUmAmAmGfAmCfCmUmCmAmAmA*mU*mU |
| D:81 | SEQ ID NO: 90 | mG*mG*mCmCmCmAmGmGfCfAfCmAmGmAmAmGmGmUmG*mC*mA |
| | SEQ ID NO: 187 | Phos mU*fG*mCmAfCmCfUmUmCmUmGmUmGfCmCfUmGmGmGmCmC*mA*mC |
| D:82 | SEQ ID NO: 91 | mU*mC*mAmGmAmUmGmGfAfGfGmAmGmGmAmUmAmUmU*mC*mA |
| | SEQ ID NO: 188 | Phos mU*fG*mAmAfUmAfUmCmCmUmCmCmUfCmCfAmUmCmUmGmA*mG*mU |
| D:83 | SEQ ID NO: 92 | mC*mC*mAmGmGmAmAmCfUfUfCmGmGmGmCmAmAmGmC*mC*mA |
| | SEQ ID NO: 189 | Phos mU*fG*mGmCfUmUfGmCmCmCmGmAmAfGmUfUmCmCmUmGmG*mG*mC |
| D:84 | SEQ ID NO: 93 | mC*mA*mGmCmCmCmAmGfGfAfAmCmUmUmCmGmGmGmC*mA*mA |
| | SEQ ID NO: 190 | Phos mU*fU*mGmCfCmCfGmAmAmGmUmUmCfCmUfGmGmGmCmUmG*mC*mA |
| D:85 | SEQ ID NO: 94 | mC*mC*mCmAmGmCmCmUfGfAfAmUmCmUmGmCmCmUmG*mG*mA |
| | SEQ ID NO: 191 | Phos mU*fC*mCmAfGmGfCmAmGmAmUmUmCfAmGfGmCmUmGmGmG*mA*mG |
| D:86 | SEQ ID NO: 95 | mC*mC*mCmAmGmGmAmAfCfUfUmCmGmGmGmCmAmAmG*mC*mA |
| | SEQ ID NO: 192 | Phos mU*fG*mCmUfUmGfCmCmCmGmAmAmGfUmUfCmCmUmGmGmG*mC*mU |
| D:87 | SEQ ID NO: 96 | mC*mA*mUmCmGmGmCmUfGfCfGmAmCmAmGmAmUmCmC*mA*mA |
| | SEQ ID NO: 193 | Phos mU*fU*mGmGfAmUfCmUmGmUmCmGmCfAmGfCmCmGmAmUmG*mC*mU |
| D:88 | SEQ ID NO: 97 | mG*mU*mGmGmCmAmCmAfGfCfAmGmCmAmUmCmGmGmC*mU*mA |
| | SEQ ID NO: 194 | Phos mU*fA*mGmCfCmGfAmUmGmCmUmGmCfUmGfUmGmCmCmAmC*mC*mA |
| D:89 | SEQ ID NO: 98 | mG*mG*mCmCmCmUmCmAfCfAfGmGmCmCmAmCmGmUmG*mC*mA |
| | SEQ ID NO: 195 | Phos mU*fG*mCmAfCmGfUmGmGmCmCmUmGfUmGfAmGmGmGmCmC*mC*mA |
| D:90 | SEQ ID NO: 99 | mA*mA*mCmUmUmCmGmGfGfCfAmAmGmCmCmUmGmUmU*mG*mA |
| | SEQ ID NO: 196 | Phos mU*fC*mAmAfCmAfGmGmCmUmUmGmCfCmCfGmAmAmGmUmU*mC*mC |
| D:91 | SEQ ID NO: 100 | mU*mA*mAmAmGmGmCmUfCfAfCmGmCmUmGmAmCmAmA*mG*mA |
| | SEQ ID NO: 197 | Phos mU*fC*mUmUfGmUfCmAmGmCmGmUmGfAmGfCmCmUmUmUmA*mA*mG |
| D:92 | SEQ ID NO: 101 | mU*mU*mCmGmGmGmCmAfAfGfCmCmUmGmUmUmGmGmA*mG*mA |
| | SEQ ID NO: 198 | Phos mU*fC*mUmCfCmAfAmCmAmGmGmCmUfUmGfCmCmCmGmAmA*mG*mU |
| D:93 | SEQ ID NO: 102 | mA*mG*mCmAmUmCmGmGfCfUfGmCmGmAmCmAmGmAmU*mC*mA |
| | SEQ ID NO: 199 | Phos mU*fG*mAmUfCmUfGmUmCmGmCmAmGfCmCfGmAmUmGmCmU*mG*mC |
| D:94 | SEQ ID NO: 103 | mA*mU*mCmUmGmCmCmUfGfGfAmUmGmGmAmAmCmUmG*mA*mA |
| | SEQ ID NO: 200 | Phos mU*fU*mCmAfGmUfUmCmCmAmUmCmCfAmGfGmCmAmGmAmU*mU*mC |
| D:95 | SEQ ID NO: 104 | mG*mC*mUmCmAmCmGmCfUfGfAmCmAmAmGmCmAmGmA*mG*mA |
| | SEQ ID NO: 201 | Phos mU*fC*mUmCfUmGfCmUmUmGmUmCmAfGmCfGmUmGmAmGmC*mC*mU |
| D:96 | SEQ ID NO: 105 | mA*mG*mAmUmGmGmAmGfGfAfGmGmAmUmAmUmUmCmU*mG*mA |
| | SEQ ID NO: 202 | Phos mU*fC*mAmGfAmAfUmAmUmCmCmUmCfCmUfCmCmAmUmCmU*mG*mA |
| D:97 | SEQ ID NO: 106 | mG*mC*mAmCmAmGmCmAfGfCfAmUmCmGmGmCmUmGmC*mG*mA |
| | SEQ ID NO: 203 | Phos mU*fC*mGmCfAmGfCmCmGmAmUmGmCfUmGfCmUmGmUmGmC*mC*mA |
| D:98 | SEQ ID NO: 107 | mA*mG*mGmAmAmCmAmGfCfCfUmGmGmGmUmCmUmCmU*mA*mA |
| | SEQ ID NO: 204 | Phos mU*fU*mAmGfAmGfAmCmCmCmAmGmGfCmUfGmUmUmCmCmU*mG*mG |
| D:99 | SEQ ID NO: 108 | mG*mG*mAmGmAmUmGmGfUf?fGmCmAmCmAmGmCmAmG*mC*mA |
| | SEQ ID NO: 205 | Phos mU*fG*mCmUfGmCfUmGmUmGmCmCmAfCmCfAmUmCmUmCmC*mC*mG |
| D:100 | SEQ ID NO: 109 | mG*mC*mAmGmCmAmUmCfGfGfCmUmGmCmGmAmCmAmG*mA*mA |
| | SEQ ID NO: 206 | Phos mU*fU*mCmUfGmUfCmGmCmAmGmCmCfGmAfUmGmCmUmGmC*mU*mG |
| D:101 | SEQ ID NO: 110 | mA*mA*mUmUmUmGmAmGfGfUfCmUmUmAmAmAmGmGmC*mU*mA |
| | SEQ ID NO: 207 | Phos mU*fA*mGmCfCmUfUmUmAmAmGmAmCfCmUfCmAmAmAmUmU*mC*mU |
| D:102 | SEQ ID NO: 111 | mA*mA*mGmUmCmCmAmGfCfUfGmAmGmGmAmGmCmGmC*mC*mA |
| | SEQ ID NO: 208 | Phos mU*fG*mGmCfGmCfUmCmCmUmCmAmGfCmUfGmGmAmCmUmU*mC*mU |
| D:103 | SEQ ID NO: 112 | mG*mA*mGmGmUmCmUmUfAfAfAmGmGmCmUmCmAmCmG*mC*mA |
| | SEQ ID NO: 209 | Phos mU*fG*mCmGfUmGfAmGmCmCmUmUmUfAmAfGmAmCmCmUmC*mA*mA |

[0124] P or [Phos] indicates a 5′ phosphate
[0125] m indicates 2′O-methyl modified ribose on the listed nucleotide
[0126] f indicates 2′F modified ribose on the listed nucleotide
[0127] * indicates a phosphorothioate bond (in place of a phosphodiester bond)

TABLE 3B
Modified sense and antisense strands for the GalNAc-ANGPTL8
RNAi Agents herein

| | | Sequence (5′ to 3′ for each sense strand |
|---|---|---|
| Duplex | SEQ ID NO: | (SS) and antisense strand (AS)) |
| D:109 | SEQ ID NO: 16 | mU*mC*mGmGmGmCmAmAfGfCfCmUmGmUmUmGmGmAmG*mA*mA |
| | SEQ ID NO: 210 | mU*fU*mCmUfCmCfAmAmCmAmGmGmCfUmUfGmCmCmCmGmA*mA*mG |
| D:110 | SEQ ID NO: 17 | mA*mA*mUmCmUmGmCmCfUfGfGmAmUmGmGmAmAmCmU*mG*mA |
| | SEQ ID NO: 211 | mU*fC*mAmGfUmUfCmCmAmUmCmCmAfGmGfCmAmGmAmUmU*mC*mA |
| D:111 | SEQ ID NO: 18 | mC*mC*mUmGmGmAmUmGfGfAfAmCmUmGmAmGmGmAmC*mC*mA |
| | SEQ ID NO: 212 | mU*fG*mGmUfCmCfUmCmAmGmUmUmCfCmAfUmCmCmAmGmG*mC*mA |
| D:112 | SEQ ID NO: 19 | mU*mU*mAmAmAmGmCmAfGfAfGmUmCmGmUmGmGmCmA*mU*mA |
| | SEQ ID NO: 213 | mU*fA*mUmGfCmCfAmCmGmAmCmUmCfUmGfCmUmUmUmAmA*mU*mG |
| D:113 | SEQ ID NO: 20 | mUmG*mCmGmAmCmAmGfAfUfCmCmAmGmGmAmGmAmG*mA*mA |
| | SEQ ID NO: 214 | mU*fU*mCmUfCmUfCmCmUmGmGmAmUfCmUfGmUmCmGmCmA*mG*mC |
| D:114 | SEQ ID NO: 21 | mU*mG*mAmAmUmCmUmGfCfCfUmGmGmAmUmGmGmAmA*mC*mA |
| | SEQ ID NO: 215 | mU*fG*mUmUfCmCfAmUmCmCmAmGmGfCmAfGmAmUmUmCmA*mG*mG |
| D:115 | SEQ ID NO: 22 | mG*mA*mGmCmUmGmCmCfUfGfUmUmCmAmCmUmGmGmG*mA*mA |
| | SEQ ID NO: 216 | mU*fU*mCmCfCmAfGmUmGmAmAmCmAfGmGfCmAmGmCmUmC*mC*mU |
| D:116 | SEQ ID NO: 23 | mA*mG*mGmUmCmUmUmAfAfAfGmGmCmUmCmAmCmGmC*mU*mA |
| | SEQ ID NO: 217 | mU*fA*mGmCfGmUfGmAmGmCmCmUmUfUmAfAmGmAmCmCmU*mC*mA |
| D:117 | SEQ ID NO: 24 | mU*mC*mAmCmUmGmGmGfAfUfCmAmGmCmCmAmGmGmG*mC*mA |
| | SEQ ID NO: 218 | mU*fG*mCmCfCmUfGmGmCmUmGmAmUfCmCfCmAmGmUmGmA*mA*mC |
| D:118 | SEQ ID NO: 25 | mU*mC*mAmUmUmAmAmAfGfCfAmGmAmGmUmCmGmUmG*mG*mA |
| | SEQ ID NO: 219 | mU*fC*mCmAfCmGfAmCmUmCmUmGmCfUmUfUmAmAmUmGmA*mG*mG |
| D:119 | SEQ ID NO: 26 | mG*mA*mAmCmAmGmCmCfUfGfGmGmUmCmUmCmUmAmU*mG*mA |
| | SEQ ID NO: 220 | mU*fC*mAmUfAmGfAmGmAmCmCmCmAfGmGfCmUmGmUmUmC*mC*mU |
| D:120 | SEQ ID NO: 27 | mG*mG*mGmGmCmAmGmGfAfGfGmUmCmAmGmCmCmGmG*mG*mA |
| | SEQ ID NO: 221 | mU*fC*mCmCfGmGfCmUmGmAmCmCmUfCmCfUmGmCmCmCmC*mA*mG |
| D:121 | SEQ ID NO: 28 | mA*mG*mCmGmGmCmUmAfGfAfAmGmUmCmCmAmGmCmU*mG*mA |
| | SEQ ID NO: 222 | mU*fC*mAmGfCmUfGmGmAmCmUmUmCfUmAfGmCmCmGmCmU*mG*mC |
| D:122 | SEQ ID NO: 29 | mG*mA*mGmAmUmGmGmUfGfGfCmAmCmAmGmCmAmGmC*mA*mA |
| | SEQ ID NO: 223 | mU*fU*mGmCfUmGfCmUmGmUmGmCmCfAmCfCmAmUmCmUmC*mC*mC |
| D:123 | SEQ ID NO: 30 | mG*mG*mCmUmGmAmCmAfAfAfGmGmCmCmAmGmGmAmA*mC*mA |
| | SEQ ID NO: 224 | mU*fG*mUmUfCmCfUmGmGmCmCmUmUfUmGfUmCmAmGmCmC*mG*mU |
| D:124 | SEQ ID NO: 31 | mG*mU*mCmCmAmGmCmUfGfAfGmGmAmGmCmGmCmCmU*mG*mA |
| | SEQ ID NO: 225 | mU*fC*mAmGfGmCfGmCmUmCmCmUmCfAmGfCmUmGmGmAmC*mU*mU |
| D:125 | SEQ ID NO: 32 | mC*mA*mUmUmAmAmAmGfCfAfGmAmGmUmCmGmUmGmG*mC*mA |
| | SEQ ID NO: 226 | mU*fG*mCmCfAmCfGmAmCmUmCmUmGfCmUfUmUmAmAmUmG*mA*mG |
| D:126 | SEQ ID NO: 33 | mU*mC*mCmCmAmGmCmCfUfGfAmAmUmCmUmGmCmCmU*mG*mA |
| | SEQ ID NO: 227 | mU*fC*mAmGfGmCfAmGmAmUmUmCmAfGmGfCmUmGmGmGmA*mG*mC |
| D:127 | SEQ ID NO: 34 | mG*mG*mAmUmGmCmAmGfCfCfCmAmGmGmAmAmCmUmU*mC*mA |
| | SEQ ID NO: 228 | mU*fG*mAmAfGmUfUmCmCmUmGmGmGfCmUfGmCmAmUmCmC*mC*mG |
| D:128 | SEQ ID NO: 35 | mG*mC*mUmAmGmAmAmGfUfCfCmAmGmCmUmGmAmGmG*mA*mA |
| | SEQ ID NO: 229 | mU*fU*mCmCfUmCfAmGmCmUmGmGmAfCmUfUmCmUmAmGmC*mC*mG |
| D:129 | SEQ ID NO: 36 | mC*mA*mCmAmGmCmAmGfCfAfUmCmGmGmCmUmGmCmG*mA*mA |
| | SEQ ID NO: 230 | mU*fU*mCmGfCmAfGmCmCmGmAmUmGfCmUfGmCmUmGmUmG*mC*mC |
| D:130 | SEQ ID NO: 37 | mG*mG*mAmAmCmUmUmCfGfGfGmCmAmAmGmCmCmUmG*mU*mA |
| | SEQ ID NO: 231 | mU*fA*mCmAfGmGfCmUmUmGmCmCmCfGmAfAmGmUmUmCmC*mU*mG |
| D:131 | SEQ ID NO: 38 | mA*mC*mUmGmGmGmAmUfCfAfGmCmCmAmGmGmGmCmG*mC*mA |
| | SEQ ID NO: 232 | mU*fG*mCmGfCmCfCmUmGmGmCmUmGfAmUfCmCmCmAmGmU*mG*mA |
| D:132 | SEQ ID NO: 39 | mA*mG*mAmAmGmUmCmCfAfGfCmUmGmAmGmGmAmGmC*mG*mA |
| | SEQ ID NO: 233 | mU*fC*mGmCfUmCfCmUmCmAmGmCmUfGmGfAmCmUmUmCmU*mA*mG |
| D:133 | SEQ ID NO: 40 | mG*mC*mAmUmCmGmGmCfUfGfCmGmAmCmAmGmAmUmC*mC*mA |
| | SEQ ID NO: 234 | mU*fG*mGmAfUmCfUmGmUmCmGmCmAfGmCfCmGmAmUmGmC*mU*mG |
| D:134 | SEQ ID NO: 41 | mA*mG*mAmUmGmGmUmGfGfCfAmCmAmGmCmAmGmCmA*mU*mA |
| | SEQ ID NO: 235 | mU*fA*mUmGfCmUfGmCmUmGmUmGmCfCmAfCmCmAmUmCmU*mC*mC |
| D:135 | SEQ ID NO: 42 | mG*mG*mUmGmGmCmAmCfAfGfCmAmGmCmAmUmCmGmG*mC*mA |
| | SEQ ID NO: 236 | mU*fG*mCmCfGmAfUmGmCmUmGmCmUfGmUfGmCmCmAmCmC*mA*mU |
| D:136 | SEQ ID NO: 43 | mA*mC*mAmGmCmAmGmCfAfUfCmGmGmCmUmGmCmGmA*mC*mA |
| | SEQ ID NO: 237 | mU*fG*mUmCfGmCfAmGmCmCmGmAmUfGmCfUmGmCmUmGmU*mG*mC |
| D:137 | SEQ ID NO: 44 | mA*mA*mGmGmCmUmCmAfCfGfCmUmGmAmCmAmAmGmC*mA*mA |
| | SEQ ID NO: 238 | mU*fU*mGmCfUmUfGmUmCmAmGmCmGfUmGfAmGmCmCmUmU*mU*mA |
| D:138 | SEQ ID NO: 45 | mA*mG*mCmCmUmGmAmAfUfCfUmGmCmCmUmGmGmAmU*mG*mA |
| | SEQ ID NO: 239 | mU*fC*mAmUfCmCfAmGmGmCmAmGmAfUmUfCmAmGmGmCmU*mG*mG |
| D:139 | SEQ ID NO: 46 | mA*mU*mCmGmGmCmUmGfCfGfAmCmAmGmAmUmCmCmA*mG*mA |
| | SEQ ID NO: 240 | mU*fC*mUmGfGmAfUmCmUmGmUmCmGfCmAfGmCmCmGmAmU*mG*mC |
| D:140 | SEQ ID NO: 47 | mA*mG*mUmCmCmAmGmCfUfGfAmGmGmAmGmCmGmCmC*mU*mA |
| | SEQ ID NO: 241 | mU*fA*mGmGfCmGfCmUmCmCmUmCmAfGmCfUmGmGmAmCmU*mU*mC |
| D:141 | SEQ ID NO: 48 | mC*mG*mGmCmAmGmAmGfGfCfGmGmGmAmGmAmUmGmG*mU*mA |
| | SEQ ID NO: 241 | mU*fA*mGmGfCmGfCmUmCmCmUmCmAfGmCfUmGmGmAmCmU*mU*mC |
| D:142 | SEQ ID NO: 49 | mA*mUmGmCmUmGmCmAfAfGfGmAmAmCmAmCmUmUmC*mC*mA |
| | SEQ ID NO: 243 | mU*fG*mGmAfAmGfUmGmUmUmCmCmUfUmGfCmAmGmCmAmU*mG*mA |
| D:143 | SEQ ID NO: 50 | mC*mU*mUmCmGmGmGmCfAfAfGmCmCmUmGmUmUmGmG*mA*mA |
| | SEQ ID NO: 244 | mU*fU*mCmCfAmAfCmAmGmGmCmUmUfGmCfCmCmGmAmAmG*mU*mU |
| D:144 | SEQ ID NO: 51 | mG*mG*mAmGmCmUmGmCfCfUfGmUmUmCmAmCmUmGmG*mG*mA |
| | SEQ ID NO: 245 | mU*fC*mCmCfAmGfUmGmAmAmCmAmGfGmCfAmGmCmUmCmC*mU*mC |
| D:145 | SEQ ID NO: 52 | mG*mC*mCmUmGmGmAmUfGfGfAmAmCmUmGmAmGmGmA*mC*mA |
| | SEQ ID NO: 246 | mU*fG*mUmCfCmUfCmAmGmUmUmCmCfAmUfCmCmAmGmGmC*mA*mG |
| D:146 | SEQ ID NO: 53 | mC*mA*mAmGmGmAmAmCfAfCfUmUmCmCmAmCmGmCmC*mC*mA |
| | SEQ ID NO: 247 | mU*fG*mGmGfCmGfUmGmGmAmAmGmUfGmUfUmCmCmUmUmG*mC*mA |
| D:147 | SEQ ID NO: 54 | mG*mG*mCmUmAmGmAmAfGfUfCmCmAmGmCmUmGmAmG*mG*mA |
| | SEQ ID NO: 248 | mU*fC*mCmUfCmAfGmCmUmGmGmAmCfUmUfCmUmAmGmCmC*mG*mC |
| D:148 | SEQ ID NO: 55 | mU*mG*mAmGmGmUmCmUfUfAfAmAmGmGmCmUmCmAmC*mG*mA |
| | SEQ ID NO: 249 | mU*fC*mGmUfGmAfGmCmCmUmUmUmAfAmGfAmCmCmUmCmA*mA*mA |
| D:149 | SEQ ID NO: 56 | mG*mG*mGmCmAmAmGmCfCfUfGmUmUmGmGmAmGmAmC*mU*mA |
| | SEQ ID NO: 250 | mU*fA*mGmUfCmUfCmCmAmAmCmAmGfGmCfUmUmGmCmCmC*mG*mA |
| D:150 | SEQ ID NO: 57 | mG*mC*mGmGmCmUmAmGfAfAfGmUmCmCmAmGmCmUmG*mA*mA |
| | SEQ ID NO: 251 | mU*fU*mCmAfGmCfUmGmGmAmCmUmUfCmUfAmGmCmCmGmC*mU*mG |
| D:151 | SEQ ID NO: 58 | mU*mG*mGmCmAmCmAmGfCfAfGmCmAmUmCmGmGmCmU*mG*mA |
| | SEQ ID NO: 252 | mU*fC*mAmGfCmCfGmAmUmGmCmUmGfCmUfGmUmGmCmCmA*mC*mC |
| D:152 | SEQ ID NO: 59 | mA*mU*mGmGmUmGmGmCfAfCfAmGmCmAmGmCmAmUmC*mG*mA |
| | SEQ ID NO: 253 | mU*fC*mGmAfUmGfCmUmGmCmUmGmUfGmCfCmAmCmCmAmU*mC*mU |
| D:153 | SEQ ID NO: 60 | mA*mG*mAmAmUmUmUmGfAfGfGmUmCmUmUmAmAmAmG*mG*mA |
| | SEQ ID NO: 254 | mU*fC*mCmUfUmUfAmAmGmAmCmCmUfCmAfAmAmUmUmCmU*mC*mG |
| D:154 | SEQ ID NO: 61 | mG*mG*mAmAmCmAmGmCfCfUfGmGmGmUmCmUmCmUmA*mU*mA |
| | SEQ ID NO: 255 | mU*fA*mUmAfGmAfGmAmCmCmCmAmGfGmCfUmGmUmUmCmC*mU*mG |
| D:155 | SEQ ID NO: 62 | mA*mG*mGmCmUmCmAmCfGfCfUmGmAmCmAmAmGmCmA*mG*mA |
| | SEQ ID NO: 256 | mU*fC*mUmGfCmUfUmGmUmCmAmGmCfGmUfGmAmGmCmCmU*mU*mU |
| D:156 | SEQ ID NO: 63 | mG*mG*mCmAmCmAmGmCfAfGfCmAmUmCmGmGmCmUmG*mC*mA |
| | SEQ ID NO: 257 | mU*fG*mCmAfGmCfCmGmAmUmGmCmUfGmCfUmGmUmGmCmC*mA*mC |
| D:157 | SEQ ID NO: 64 | mC*mG*mGmGmCmAmAmGfCfCfUmGmUmUmGmGmAmGmA*mC*mA |
| | SEQ ID NO: 258 | mU*fG*mUmCfUmCfCmAmAmCmAmGmGfCmUfUmGmCmCmCmG*mA*mA |
| D:158 | SEQ ID NO: 65 | mA*mA*mAmGmGmCmUmCfAfCfGmCmUmGmAmCmAmAmG*mC*mA |
| | SEQ ID NO: 259 | mU*fG*mCmUfUmGfUmCmAmGmCmGmUfGmAfGmCmCmUmUmU*mA*mA |
| D:159 | SEQ ID NO: 66 | mG*mA*mAmUmCmUmGmCfCfUfGmGmAmUmGmGmAmAmC*mU*mA |
| | SEQ ID NO: 260 | mU*fA*mGmUfUmCfCmAmUmCmCmAmGfGmCfAmGmAmUmUmC*mA*mG |
| D:160 | SEQ ID NO: 67 | mC*mC*mUmGmUmUmCmAfCfUfGmGmGmAmUmCmAmGmC*mC*mA |
| | SEQ ID NO: 261 | mU*fG*mGmCfUmGfAmUmCmCmCmAmGfUmGfAmAmCmAmGmG*mC*mA |
| D:161 | SEQ ID NO: 68 | mA*mU*mUmAmAmAmGmCfAfGfAmGmUmCmGmUmGmGmC*mA*mA |
| | SEQ ID NO: 262 | mU*fU*mGmCfCmAfCmGmAmCmUmCmUfGmCfUmUmUmAmAmU*mG*mA |
| D:162 | SEQ ID NO: 69 | mU*mG*mGmUmGmGmCmAfCfAfGmCmAmGmCmAmUmCmG*mG*mA |
| | SEQ ID NO: 263 | mU*fC*mCmGfAmUfGmCmUmGmCmUmGfUmGfCmCmAmCmCmA*mU*mC |
| D:163 | SEQ ID NO: 70 | mA*mG*mGmAmGmGmAmUfAfUfUmCmUmGmCmAmGmCmU*mG*mA |
| | SEQ ID NO: 264 | mU*fC*mAmGfCmUfGmCmAmGmAmAmUfAmUfCmCmUmCmCmU*mC*mC |
| D:164 | SEQ ID NO: 71 | mU*mU*mGmAmGmGmUmCfUfUfAmAmAmGmGmCmUmCmA*mC*mA |
| | SEQ ID NO: 265 | mU*fG*mUmGfAmGfCmCmUmUmUmAmAfGmAfCmCmUmCmAmA*mA*mU |
| D:165 | SEQ ID NO: 72 | mG*mC*mCmCmAmGmGmAfAfCfUmUmCmGmGmGmCmAmA*mG*mA |
| | SEQ ID NO: 266 | mU*fC*mUmUfGmCfCmCmGmAmAmGmUfUmCfCmUmGmGmGmC*mU*mG |
| D:166 | SEQ ID NO: 73 | mU*mA*mGmAmAmGmUmCfCfAfGmCmUmGmAmGmGmAmG*mC*mA |
| | SEQ ID NO: 267 | mU*fG*mCmUfCmCfUmCmAmGmCmUmGfGmAfCmUmUmCmUmA*mG*mC |
| D:167 | SEQ ID NO: 74 | mC*mU*mGmCmCmUmGmUfUfCfAmCmUmGmGmGmAmUmC*mA*mA |
| | SEQ ID NO: 268 | mU*fU*mGmAfUmCfCmCmAmGmUmGmAfAmCfAmGmGmCmAmG*mC*mU |
| D:168 | SEQ ID NO: 75 | mU*mC*mUmGmCmCmUmGfGfAfUmGmGmAmAmCmUmGmA*mG*mA |
| | SEQ ID NO: 269 | mU*fC*mUmCfAmGfUmUmCmCmAmUmCfCmAfGmGmCmAmGmA*mU*mU |
| D:169 | SEQ ID NO: 76 | mC*mA*mCmGmCmUmGmAfCfAfAmGmCmAmGmAmGmCmC*mA*mA |
| | SEQ ID NO: 270 | mU*fU*mGmGfCmUfCmUmGmCmUmUmGfUmCfAmGmCmGmUmG*mA*mG |
| D:170 | SEQ ID NO: 77 | mU*mG*mCmCmUmGmGmAfUfGfGmAmAmCmUmGmAmGmG*mA*mA |
| | SEQ ID NO: 271 | mU*fU*mCmCfUmCfAmGmUmUmCmCmAfUmCfCmAmGmGmCmA*mG*mA |
| D:171 | SEQ ID NO: 78 | mG*mA*mUmGmGmUmGmGfCfAfCmAmGmCmAmGmCmAmU*mC*mA |
| | SEQ ID NO: 272 | mU*fG*mAmUfGmCfUmGmCmUmGmUmGfCmCfAmCmCmAmUmC*mU*mC |
| D:172 | SEQ ID NO: 79 | mG*mU*mCmUmUmAmAmAfGfGfCmUmCmAmCmGmCmUmG*mA*mA |
| | SEQ ID NO: 273 | mU*fU*mCmAfGmCfGmUmGmAmGmCmCfUmUfUmAmAmGmAmC*mC*mU |
| D:173 | SEQ ID NO: 80 | mG*mA*mUmGmCmAmGmCfCfCfAmGmGmAmAmCmUmUmC*mG*mA |
| | SEQ ID NO: 274 | mU*fC*mGmAfAmGfUmUmCmCmUmGmGfGmCfUmGmCmAmUmC*mC*mC |
| D:174 | SEQ ID NO: 81 | mG*mA*mGmAmAmUmUmUfGfAfGmGmUmCmUmUmAmAmA*mG*mA |
| | SEQ ID NO: 275 | mU*fC*mUmUfUmAfAmGmAmCmCmUmCfAmAfAmUmUmCmUmC*mG*mG |
| D:175 | SEQ ID NO: 82 | mG*mA*mUmGmGmAmGmGfAfGfGmAmUmAmUmUmCmUmG*mC*mA |
| | SEQ ID NO: 276 | mU*fG*mCmAfGmAfAmUmAmUmCmCmUfCmCfUmCmCmAmUmC*mU*mG |
| D:176 | SEQ ID NO: 83 | mU*mG*mAmCmAmAmAmGfGfCfCmAmGmGmAmAmCmAmG*mC*mA |
| | SEQ ID NO: 277 | mU*fG*mCmUfGmUfUmCmCmUmGmGmCfCmUfUmUmGmUmCmA*mG*mC |
| D:177 | SEQ ID NO: 84 | mC*mU*mCmAmCmGmCmUfGfAfCmAmAmGmCmAmGmAmG*mC*mA |
| | SEQ ID NO: 278 | mU*fG*mCmUfCmUfGmCmUmUmGmUmCfAmGfCmGmUmGmAmG*mC*mC |
| D:178 | SEQ ID NO: 85 | mG*mC*mCmUmGmAmAmUfCfUfGmCmCmUmGmGmAmUmG*mG*mA |
| | SEQ ID NO: 279 | mU*fC*mCmAfUmCfCmAmGmGmCmAmGfAmUfUmCmAmGmGmC*mU*mG |
| D:179 | SEQ ID NO: 86 | mA*mC*mAmGmCmCmUmGfGfGfUmCmUmCmUmAmUmGmG*mC*mA |
| | SEQ ID NO: 280 | mU*fG*mCmCfAmUfAmGmAmGmAmCmCfCmAfGmGmCmUmGmU*mU*mC |
| D:180 | SEQ ID NO: 87 | mC*mA*mGmGmAmAmCmUfUfCfGmGmGmCmAmAmGmCmC*mU*mA |
| | SEQ ID NO: 281 | mU*fA*mGmGfCmUfUmGmCmCmCmGmAfAmGfUmUmCmCmUmG*mG*mG |
| D:181 | SEQ ID NO: 88 | mG*mC*mAmAmGmGmAmAfCfAfCmUmUmCmCmAmCmGmC*mC*mA |
| | SEQ ID NO: 282 | mU*fG*mGmCfGmUfGmGmAmAmGmUmGfUmUfCmCmUmUmGmC*mA*mG |
| D:182 | SEQ ID NO: 89 | mU*mUmUmGmAmGmGmUfCfUfUmAmAmAmGmGmCmUmC*mA*mA |
| | SEQ ID NO: 283 | mU*fU*mGmAfGmCfCmUmUmUmAmAmGfAmCfCmUmCmAmAmA*mU*mU |
| D:183 | SEQ ID NO: 90 | mG*mG*mCmCmCmAmGmGfCfAfCmAmGmAmAmGmGmUmG*mC*mA |
| | SEQ ID NO: 284 | mU*fG*mCmAfCmCfUmUmCmUmGmUmGfCmCfUmGmGmGmCmC*mA*mC |
| D:184 | SEQ ID NO: 91 | mU*mC*mAmGmAmUmGmGfAfGfGmAmGmGmAmUmAmUmU*mC*mA |
| | SEQ ID NO: 285 | mU*fG*mAmAfUmAfUmCmCmUmCmCmUfCmCfAmUmCmUmGmA*mG*mU |
| D:185 | SEQ ID NO: 92 | mC*mC*mAmGmGmAmAmCfUfUfCmGmGmGmCmAmAmGmC*mC*mA |
| | SEQ ID NO: 286 | mU*fG*mGmCfUmUfGmCmCmCmGmAmAfGmUfUmCmCmUmGmG*mG*mC |
| D:186 | SEQ ID NO: 93 | mC*mA*mGmCmCmCmAmGfGfAfAmCmUmUmCmGmGmGmC*mA*mA |
| | SEQ ID NO: 287 | mU*fU*mGmCfCmCfGmAmAmGmUmUmCfCmUfGmGmGmCmUmG*mC*mA |
| D:187 | SEQ ID NO: 94 | mC*mC*mCmAmGmCmCmUfGfAfAmUmCmUmGmCmCmUmG*mG*mA |
| | SEQ ID NO: 288 | mU*fC*mCmAfGmGfCmAmGmAmUmUmCfAmGfGmCmUmGmGmG*mA*mG |
| D:188 | SEQ ID NO: 95 | mC*mC*mCmAmGmGmAmAfCfUfUmCmGmGmGmCmAmAmG*mC*mA |
| | SEQ ID NO: 289 | mU*fG*mCmUfUmGfCmCmCmGmAmAmGfUmUfCmCmUmGmGmG*mC*mU |
| D:189 | SEQ ID NO: 96 | mC*mA*mUmCmGmGmCmUfGfCfGmAmCmAmGmAmUmCmC*mA*mA |
| | SEQ ID NO: 290 | mU*fU*mGmGfAmUfCmUmGmUmCmGmCfAmGfCmCmGmAmUmG*mC*mU |
| D:190 | SEQ ID NO: 97 | mG*mU*mGmGmCmAmCmAfGfCfAmGmCmAmUmCmGmGmC*mU*mA |
| | SEQ ID NO: 291 | mU*fA*mGmCfCmGfAmUmGmCmUmGmCfUmGfUmGmCmCmAmC*mC*mA |
| D:191 | SEQ ID NO: 98 | mG*mG*mCmCmCmUmCmAfCfAfGmGmCmCmAmCmGmUmG*mC*mA |
| | SEQ ID NO: 292 | mU*fG*mCmAfCmGfUmGmGmCmCmUmGfUmGfAmGmGmGmCmC*mC*mA |
| D:192 | SEQ ID NO: 99 | mA*mA*mCmUmUmCmGmGfGfCfAmAmGmCmCmUmGmUmU*mG*mA |
| | SEQ ID NO: 293 | mU*fC*mAmAfCmAfGmGmCmUmUmGmCfCmCfGmAmAmGmUmU*mC*mC |
| D:193 | SEQ ID NO: 100 | mU*mA*mAmAmGmGmCmUfCfAfCmGmCmUmGmAmCmAmA*mG*mA |
| | SEQ ID NO: 294 | mU*fC*mUmUfGmUfCmAmGmCmGmUmGfAmGfCmCmUmUmUmA*mA*mG |
| D:194 | SEQ ID NO: 101 | mU*mU*mCmGmGmGmCmAfAfGfCmCmUmGmUmUmGmGmA*mG*mA |
| | SEQ ID NO: 295 | mU*fC*mUmCfCmAfAmCmAmGmGmCmUfUmGfCmCmCmGmAmA*mG*mU |
| D:195 | SEQ ID NO: 102 | mA*mG*mCmAmUmCmGmGfCfUfGmCmGmAmCmAmGmAmU*mC*mA |
| | SEQ ID NO: 296 | mU*fG*mAmUfCmUfGmUmCmGmCmAmGfCmCfGmAmUmGmCmU*mG*mC |
| D:196 | SEQ ID NO: 103 | mA*mU*mCmUmGmCmCmUfGfGfAmUmGmGmAmAmCmUmG*mA*mA |
| | SEQ ID NO: 297 | mU*fU*mCmAfGmUfUmCmCmAmUmCmCfAmGfGmCmAmGmAmU*mU*mC |
| D:197 | SEQ ID NO: 104 | mG*mC*mUmCmAmCmGmCfUfGfAmCmAmAmGmCmAmGmA*mG*mA |
| | SEQ ID NO: 298 | mU*fC*mUmCfUmGfCmUmUmGmUmCmAfGmCfGmUmGmAmGmC*mC*mU |
| D:198 | SEQ ID NO: 105 | mA*mG*mAmUmGmGmAmGfGfAfGmGmAmUmAmUmUmCmU*mG*mA |
| | SEQ ID NO: 299 | mU*fC*mAmGfAmAfUmAmUmCmCmUmCfCmUfCmCmAmUmCmU*mG*mA |
| D:199 | SEQ ID NO: 106 | mG*mC*mAmCmAmGmCmAfGfCfAmUmCmGmGmCmUmGmC*mG*mA |
| | SEQ ID NO: 300 | mU*fC*mGmCfAmGfCmCmGmAmUmGmCfUmGfCmUmGmUmGmC*mC*mA |
| D:200 | SEQ ID NO: 107 | mA*mG*mGmAmAmCmAmGfCfCfUmGmGmGmUmCmUmCmU*mA*mA |
| | SEQ ID NO: 301 | mU*fU*mAmGfAmGfAmCmCmCmAmGmGfCmUfGmUmUmCmCmU*mG*mG |
| D:201 | SEQ ID NO: 108 | mG*mG*mAmGmAmUmGmGfUfGfGmCmAmCmAmGmCmAmG*mC*mA |
| | SEQ ID NO: 302 | mU*fG*mCmUfGmCfUmGmUmGmCmCmAfCmCfAmUmCmUmCmC*mC*mG |
| D:202 | SEQ ID NO: 109 | mG*mC*mAmGmCmAmUmCfGfGfCmUmGmCmGmAmCmAmG*mA*mA |
| | SEQ ID NO: 303 | mU*fU*mCmUfGmUfCmGmCmAmGmCmCfGmAfUmGmCmUmGmC*mU*mG |
| D:203 | SEQ ID NO: 110 | mA*mA*mUmUmUmGmAmGfGfUfCmUmUmAmAmAmGmGmC*mU*mA |
| | SEQ ID NO: 304 | mU*fA*mGmCfCmUfUmUmAmAmGmAmCfCmUfCmAmAmAmUmU*mC*mU |
| D:204 | SEQ ID NO: 111 | mA*mA*mGmUmCmCmAmGfCfUfGmAmGmGmAmGmCmGmC*mC*mA |
| | SEQ ID NO: 305 | mU*fG*mGmCfGmCfUmCmCmUmCmAmGfCmUfGmGmAmCmUmU*mC*mU |
| D:205 | SEQ ID NO: 112 | mG*mA*mGmGmUmCmUmUfAfAfAmGmGmCmUmCmAmCmG*mC*mA |
| | SEQ ID NO: 306 | mU*fG*mCmGfUmGfAmGmCmCmUmUmUfAmAfGmAmCmCmUmC*mA*mA |

[0128] m indicates 2′O-methyl modified ribose on the listed nucleotide
[0129] f indicates 2′F modified ribose on the listed nucleotide
[0130] * indicates a phosphorothioate bond (in place of a phosphodiester bond)

TABLE 4
Sense and antisense strands for the GalNAc-ANGPTL8

| | | | | | Start Position |
|---|---|---|---|---|---|
| | | | | | on human Ang8 |
| Duplex | | | | | transcript |
| NO: | Seq ID NO: | Sense21Mer | SEQ ID NO: | AntiSense23Mer | NM_018687.7 |
| D:206 | SEQ ID NO: 307 | UCGGGCAAGCCUGUUGGAGAA | SEQ ID NO: 409 | UUCUCCAACAGGCUUGCCCGAAG | 294 |
| D:207 | SEQ ID NO: 308 | AAUCUGCCUGGAUGGAACUGA | SEQ ID NO: 410 | UCAGUUCCAUCCAGGCAGAUUCA | 618 |
| D:208 | SEQ ID NO: 309 | CCUGGAUGGAACUGAGGACCA | SEQ ID NO: 411 | UGGUCCUCAGUUCCAUCCAGGCA | 624 |
| D:209 | SEQ ID NO: 310 | UUAAAGCAGAGUCGUGGCAUA | SEQ ID NO: 412 | UAUGCCACGACUCUGCUUUAAUG | 851 |
| D:210 | SEQ ID NO: 311 | UGCGACAGAUCCAGGAGAGAA | SEQ ID NO: 413 | UUCUCUCCUGGAUCUGUCGCAGC | 572 |
| D:211 | SEQ ID NO: 312 | UGAAUCUGCCUGGAUGGAACA | SEQ ID NO: 414 | UGUUCCAUCCAGGCAGAUUCAGG | 616 |
| D:212 | SEQ ID NO: 313 | GAGCUGCCUGUUCACUGGGAA | SEQ ID NO: 415 | UUCCCAGUGAACAGGCAGCUCCU | 696 |
| D:213 | SEQ ID NO: 314 | AGGUCUUAAAGGCUCACGCUA | SEQ ID NO: 416 | UAGCGUGAGCCUUUAAGACCUCA | 470 |
| D:214 | SEQ ID NO: 315 | UCACUGGGAUCAGCCAGGGCA | SEQ ID NO: 417 | UGCCCUGGCUGAUCCCAGUGAAC | 707 |
| D:215 | SEQ ID NO: 316 | UCAUUAAAGCAGAGUCGUGGA | SEQ ID NO: 418 | UCCACGACUCUGCUUUAAUGAGG | 848 |
| D:216 | SEQ ID NO: 317 | GAACAGCCUGGGUCUCUAUGA | SEQ ID NO: 419 | UCAUAGAGACCCAGGCUGUUCCU | 213 |
| D:217 | SEQ ID NO: 318 | GGGGCAGGAGGUCAGCCGGGA | SEQ ID NO: 420 | UCCCGGCUGACCUCCUGCCCCAG | 252 |
| D:218 | SEQ ID NO: 319 | AGCGGCUAGAAGUCCAGCUGA | SEQ ID NO: 421 | UCAGCUGGACUUCUAGCCGCUGC | 413 |
| D:219 | SEQ ID NO: 320 | GAGAUGGUGGCACAGCAGCAA | SEQ ID NO: 422 | UUGCUGCUGUGCCACCAUCUCCC | 547 |
| D:220 | SEQ ID NO: 321 | GGCUGACAAAGGCCAGGAACA | SEQ ID NO: 423 | UGUUCCUGGCCUUUGUCAGCCGU | 197 |
| D:221 | SEQ ID NO: 322 | GUCCAGCUGAGGAGCGCCUGA | SEQ ID NO: 424 | UCAGGCGCUCCUCAGCUGGACUU | 424 |
| D:222 | SEQ ID NO: 323 | CAUUAAAGCAGAGUCGUGGCA | SEQ ID NO: 425 | UGCCACGACUCUGCUUUAAUGAG | 849 |
| D:223 | SEQ ID NO: 324 | UCCCAGCCUGAAUCUGCCUGA | SEQ ID NO: 426 | UCAGGCAGAUUCAGGCUGGGAGC | 608 |
| D:224 | SEQ ID NO: 325 | GGAUGCAGCCCAGGAACUUCA | SEQ ID NO: 427 | UGAAGUUCCUGGGCUGCAUCCCG | 276 |
| D:225 | SEQ ID NO: 326 | GCUAGAAGUCCAGCUGAGGAA | SEQ ID NO: 428 | UUCCUCAGCUGGACUUCUAGCCG | 417 |
| D:226 | SEQ ID NO: 327 | CACAGCAGCAUCGGCUGCGAA | SEQ ID NO: 429 | UUCGCAGCCGAUGCUGCUGUGCC | 557 |
| D:227 | SEQ ID NO: 328 | GGAACUUCGGGCAAGCCUGUA | SEQ ID NO: 430 | UACAGGCUUGCCCGAAGUUCCUG | 288 |
| D:228 | SEQ ID NO: 329 | ACUGGGAUCAGCCAGGGCGCA | SEQ ID NO: 431 | UGCGCCCUGGCUGAUCCCAGUGA | 709 |
| D:229 | SEQ ID NO: 330 | AGAAGUCCAGCUGAGGAGCGA | SEQ ID NO: 432 | UCGCUCCUCAGCUGGACUUCUAG | 420 |
| D:230 | SEQ ID NO: 331 | GCAUCGGCUGCGACAGAUCCA | SEQ ID NO: 433 | UGGAUCUGUCGCAGCCGAUGCUG | 564 |
| D:231 | SEQ ID NO: 332 | AGAUGGUGGCACAGCAGCAUA | SEQ ID NO: 434 | UAUGCUGCUGUGCCACCAUCUCC | 548 |
| D:232 | SEQ ID NO: 333 | GGUGGCACAGCAGCAUCGGCA | SEQ ID NO: 435 | UGCCGAUGCUGCUGUGCCACCAU | 552 |
| D:233 | SEQ ID NO: 334 | ACAGCAGCAUCGGCUGCGACA | SEQ ID NO: 436 | UGUCGCAGCCGAUGCUGCUGUGC | 558 |
| D:234 | SEQ ID NO: 335 | AAGGCUCACGCUGACAAGCAA | SEQ ID NO: 437 | UUGCUUGUCAGCGUGAGCCUUUA | 478 |
| D:235 | SEQ ID NO: 336 | AGCCUGAAUCUGCCUGGAUGA | SEQ ID NO: 438 | UCAUCCAGGCAGAUUCAGGCUGG | 612 |
| D:236 | SEQ ID NO: 337 | AUCGGCUGCGACAGAUCCAGA | SEQ ID NO: 439 | UCUGGAUCUGUCGCAGCCGAUGC | 566 |
| D:237 | SEQ ID NO: 338 | AGUCCAGCUGAGGAGCGCCUA | SEQ ID NO: 440 | UAGGCGCUCCUCAGCUGGACUUC | 423 |
| D:238 | SEQ ID NO: 339 | CGGCAGAGGCGGGAGAUGGUA | SEQ ID NO: 441 | UACCAUCUCCCGCCUCUGCCGCU | 535 |
| D:239 | SEQ ID NO: 340 | AUGCUGCAAGGAACACUUCCA | SEQ ID NO: 442 | UGGAAGUGUUCCUUGCAGCAUGA | 648 |
| D:240 | SEQ ID NO: 341 | CUUCGGGCAAGCCUGUUGGAA | SEQ ID NO: 443 | UUCCAACAGGCUUGCCCGAAGUU | 292 |
| D:241 | SEQ ID NO: 342 | GGAGCUGCCUGUUCACUGGGA | SEQ ID NO: 444 | UCCCAGUGAACAGGCAGCUCCUC | 695 |
| D:242 | SEQ ID NO: 343 | GCCUGGAUGGAACUGAGGACA | SEQ ID NO: 445 | UGUCCUCAGUUCCAUCCAGGCAG | 623 |
| D:243 | SEQ ID NO: 344 | CAAGGAACACUUCCACGCCCA | SEQ ID NO: 446 | UGGGCGUGGAAGUGUUCCUUGCA | 654 |
| D:244 | SEQ ID NO: 345 | GGCUAGAAGUCCAGCUGAGGA | SEQ ID NO: 447 | UCCUCAGCUGGACUUCUAGCCGC | 416 |
| D:245 | SEQ ID NO: 346 | UGAGGUCUUAAAGGCUCACGA | SEQ ID NO: 448 | UCGUGAGCCUUUAAGACCUCAAA | 468 |
| D:246 | SEQ ID NO: 347 | GGGCAAGCCUGUUGGAGACUA | SEQ ID NO: 449 | UAGUCUCCAACAGGCUUGCCCGA | 296 |
| D:247 | SEQ ID NO: 348 | GCGGCUAGAAGUCCAGCUGAA | SEQ ID NO: 450 | UUCAGCUGGACUUCUAGCCGCUG | 414 |
| D:248 | SEQ ID NO: 349 | UGGCACAGCAGCAUCGGCUGA | SEQ ID NO: 451 | UCAGCCGAUGCUGCUGUGCCACC | 554 |
| D:249 | SEQ ID NO: 350 | AUGGUGGCACAGCAGCAUCGA | SEQ ID NO: 452 | UCGAUGCUGCUGUGCCACCAUCU | 550 |
| D:250 | SEQ ID NO: 351 | AGAAUUUGAGGUCUUAAAGGA | SEQ ID NO: 453 | UCCUUUAAGACCUCAAAUUCUCG | 462 |
| D:251 | SEQ ID NO: 352 | GGAACAGCCUGGGUCUCUAUA | SEQ ID NO: 454 | UAUAGAGACCCAGGCUGUUCCUG | 212 |
| D:252 | SEQ ID NO: 353 | AGGCUCACGCUGACAAGCAGA | SEQ ID NO: 455 | UCUGCUUGUCAGCGUGAGCCUUU | 479 |
| D:253 | SEQ ID NO: 354 | GGCACAGCAGCAUCGGCUGCA | SEQ ID NO: 456 | UGCAGCCGAUGCUGCUGUGCCAC | 555 |
| D:254 | SEQ ID NO: 355 | CGGGCAAGCCUGUUGGAGACA | SEQ ID NO: 457 | UGUCUCCAACAGGCUUGCCCGAA | 295 |
| D:255 | SEQ ID NO: 356 | AAAGGCUCACGCUGACAAGCA | SEQ ID NO: 458 | UGCUUGUCAGCGUGAGCCUUUAA | 477 |
| D:256 | SEQ ID NO: 357 | GAAUCUGCCUGGAUGGAACUA | SEQ ID NO: 459 | UAGUUCCAUCCAGGCAGAUUCAG | 617 |
| D:257 | SEQ ID NO: 358 | CCUGUUCACUGGGAUCAGCCA | SEQ ID NO: 460 | UGGCUGAUCCCAGUGAACAGGCA | 702 |
| D:258 | SEQ ID NO: 359 | AUUAAAGCAGAGUCGUGGCAA | SEQ ID NO: 461 | UUGCCACGACUCUGCUUUAAUGA | 850 |
| D:259 | SEQ ID NO: 360 | UGGUGGCACAGCAGCAUCGGA | SEQ ID NO: 462 | UCCGAUGCUGCUGUGCCACCAUC | 551 |
| D:260 | SEQ ID NO: 361 | AGGAGGAUAUUCUGCAGCUGA | SEQ ID NO: 463 | UCAGCUGCAGAAUAUCCUCCUCC | 323 |
| D:261 | SEQ ID NO: 362 | UUGAGGUCUUAAAGGCUCACA | SEQ ID NO: 464 | UGUGAGCCUUUAAGACCUCAAAU | 467 |
| D:262 | SEQ ID NO: 363 | GCCCAGGAACUUCGGGCAAGA | SEQ ID NO: 465 | UCUUGCCCGAAGUUCCUGGGCUG | 283 |
| D:263 | SEQ ID NO: 364 | UAGAAGUCCAGCUGAGGAGCA | SEQ ID NO: 466 | UGCUCCUCAGCUGGACUUCUAGC | 419 |
| D:264 | SEQ ID NO: 365 | CUGCCUGUUCACUGGGAUCAA | SEQ ID NO: 467 | UUGAUCCCAGUGAACAGGCAGCU | 699 |
| D:265 | SEQ ID NO: 366 | UCUGCCUGGAUGGAACUGAGA | SEQ ID NO: 468 | UCUCAGUUCCAUCCAGGCAGAUU | 620 |
| D:266 | SEQ ID NO: 367 | CACGCUGACAAGCAGAGCCAA | SEQ ID NO: 469 | UUGGCUCUGCUUGUCAGCGUGAG | 484 |
| D:267 | SEQ ID NO: 368 | UGCCUGGAUGGAACUGAGGAA | SEQ ID NO: 470 | UUCCUCAGUUCCAUCCAGGCAGA | 622 |
| D:268 | SEQ ID NO: 369 | GAUGGUGGCACAGCAGCAUCA | SEQ ID NO: 471 | UGAUGCUGCUGUGCCACCAUCUC | 549 |
| D:269 | SEQ ID NO: 370 | GUCUUAAAGGCUCACGCUGAA | SEQ ID NO: 472 | UUCAGCGUGAGCCUUUAAGACCU | 472 |
| D:270 | SEQ ID NO: 371 | GAUGCAGCCCAGGAACUUCGA | SEQ ID NO: 473 | UCGAAGUUCCUGGGCUGCAUCCC | 277 |
| D:271 | SEQ ID NO: 372 | GAGAAUUUGAGGUCUUAAAGA | SEQ ID NO: 474 | UCUUUAAGACCUCAAAUUCUCGG | 461 |
| D:272 | SEQ ID NO: 373 | GAUGGAGGAGGAUAUUCUGCA | SEQ ID NO: 475 | UGCAGAAUAUCCUCCUCCAUCUG | 318 |
| D:273 | SEQ ID NO: 374 | UGACAAAGGCCAGGAACAGCA | SEQ ID NO: 476 | UGCUGUUCCUGGCCUUUGUCAGC | 200 |
| D:274 | SEQ ID NO: 375 | CUCACGCUGACAAGCAGAGCA | SEQ ID NO: 477 | UGCUCUGCUUGUCAGCGUGAGCC | 482 |
| D:275 | SEQ ID NO: 376 | GCCUGAAUCUGCCUGGAUGGA | SEQ ID NO: 478 | UCCAUCCAGGCAGAUUCAGGCUG | 613 |
| D:276 | SEQ ID NO: 377 | ACAGCCUGGGUCUCUAUGGCA | SEQ ID NO: 479 | UGCCAUAGAGACCCAGGCUGUUC | 215 |
| D:277 | SEQ ID NO: 378 | CAGGAACUUCGGGCAAGCCUA | SEQ ID NO: 480 | UAGGCUUGCCCGAAGUUCCUGGG | 286 |
| D:278 | SEQ ID NO: 379 | GCAAGGAACACUUCCACGCCA | SEQ ID NO: 481 | UGGCGUGGAAGUGUUCCUUGCAG | 653 |
| D:279 | SEQ ID NO: 380 | UUUGAGGUCUUAAAGGCUCAA | SEQ ID NO: 482 | UUGAGCCUUUAAGACCUCAAAUU | 466 |
| D:280 | SEQ ID NO: 381 | GGCCCAGGCACAGAAGGUGCA | SEQ ID NO: 483 | UGCACCUUCUGUGCCUGGGCCAC | 378 |
| D:281 | SEQ ID NO: 382 | UCAGAUGGAGGAGGAUAUUCA | SEQ ID NO: 484 | UGAAUAUCCUCCUCCAUCUGAGU | 315 |
| D:282 | SEQ ID NO: 383 | CCAGGAACUUCGGGCAAGCCA | SEQ ID NO: 485 | UGGCUUGCCCGAAGUUCCUGGGC | 285 |
| D:283 | SEQ ID NO: 384 | CAGCCCAGGAACUUCGGGCAA | SEQ ID NO: 486 | UUGCCCGAAGUUCCUGGGCUGCA | 281 |
| D:284 | SEQ ID NO: 385 | CCCAGCCUGAAUCUGCCUGGA | SEQ ID NO: 487 | UCCAGGCAGAUUCAGGCUGGGAG | 609 |
| D:285 | SEQ ID NO: 386 | CCCAGGAACUUCGGGCAAGCA | SEQ ID NO: 488 | UGCUUGCCCGAAGUUCCUGGGCU | 284 |
| D:286 | SEQ ID NO: 387 | CAUCGGCUGCGACAGAUCCAA | SEQ ID NO: 489 | UUGGAUCUGUCGCAGCCGAUGCU | 565 |
| D:287 | SEQ ID NO: 388 | GUGGCACAGCAGCAUCGGCUA | SEQ ID NO: 490 | UAGCCGAUGCUGCUGUGCCACCA | 553 |
| D:288 | SEQ ID NO: 389 | GGCCCUCACAGGCCACGUGCA | SEQ ID NO: 491 | UGCACGUGGCCUGUGAGGGCCCA | 513 |
| D:289 | SEQ ID NO: 390 | AACUUCGGGCAAGCCUGUUGA | SEQ ID NO: 492 | UCAACAGGCUUGCCCGAAGUUCC | 290 |
| D:290 | SEQ ID NO: 391 | UAAAGGCUCACGCUGACAAGA | SEQ ID NO: 493 | UCUUGUCAGCGUGAGCCUUUAAG | 476 |
| D:291 | SEQ ID NO: 392 | UUCGGGCAAGCCUGUUGGAGA | SEQ ID NO: 494 | UCUCCAACAGGCUUGCCCGAAGU | 293 |
| D:292 | SEQ ID NO: 393 | AGCAUCGGCUGCGACAGAUCA | SEQ ID NO: 495 | UGAUCUGUCGCAGCCGAUGCUGC | 563 |
| D:293 | SEQ ID NO: 394 | AUCUGCCUGGAUGGAACUGAA | SEQ ID NO: 496 | UUCAGUUCCAUCCAGGCAGAUUC | 619 |
| D:294 | SEQ ID NO: 395 | GCUCACGCUGACAAGCAGAGA | SEQ ID NO: 497 | UCUCUGCUUGUCAGCGUGAGCCU | 481 |
| D:295 | SEQ ID NO: 396 | AGAUGGAGGAGGAUAUUCUGA | SEQ ID NO: 498 | UCAGAAUAUCCUCCUCCAUCUGA | 317 |
| D:296 | SEQ ID NO: 397 | GCACAGCAGCAUCGGCUGCGA | SEQ ID NO: 499 | UCGCAGCCGAUGCUGCUGUGCCA | 556 |
| D:297 | SEQ ID NO: 398 | AGGAACAGCCUGGGUCUCUAA | SEQ ID NO: 500 | UUAGAGACCCAGGCUGUUCCUGG | 211 |
| D:298 | SEQ ID NO: 399 | GGAGAUGGUGGCACAGCAGCA | SEQ ID NO: 501 | UGCUGCUGUGCCACCAUCUCCCG | 546 |
| D:299 | SEQ ID NO: 400 | GCAGCAUCGGCUGCGACAGAA | SEQ ID NO: 502 | UUCUGUCGCAGCCGAUGCUGCUG | 561 |
| D:300 | SEQ ID NO: 401 | AAUUUGAGGUCUUAAAGGCUA | SEQ ID NO: 503 | UAGCCUUUAAGACCUCAAAUUCU | 464 |
| D:301 | SEQ ID NO: 402 | AAGUCCAGCUGAGGAGCGCCA | SEQ ID NO: 504 | UGGCGCUCCUCAGCUGGACUUCU | 422 |
| D:302 | SEQ ID NO: 403 | GAGGUCUUAAAGGCUCACGCA | SEQ ID NO: 505 | UGCGUGAGCCUUUAAGACCUCAA | 469 |
| D:303 | SEQ ID NO: 404 | AGCAGCAUCGGCUGCGACAGA | SEQ ID NO: 506 | UCUGUCGCAGCCGAUGCUGCUGU | 560 |
| D:304 | SEQ ID NO: 405 | GGAGCUGACCCUGCUCUUCCA | SEQ ID NO: 507 | UGGAAGAGCAGGGUCAGCUCCUC | 120 |
| D:305 | SEQ ID NO: 406 | GACUCAGAUGGAGGAGGAUAU | SEQ ID NO: 508 | AUAUCCUCCUCCAUCUGAGUCUC | 312 |
| D:306 | SEQ ID NO: 407 | CUUAAAGGCUCACGCUGACAA | SEQ ID NO: 509 | UUGUCAGCGUGAGCCUUUAAGAC | 474 |
| D:307 | SEQ ID NO: 408 | AAGCCUGUUGGAGACUCAGAU | SEQ ID NO: 510 | AUCUGAGUCUCCAACAGGCUUGC | 300 |

### Human ANGPTL8 Transcript NM 018687.7 SEQ ID 511:

ataccttaga ccctcagtca tgccagtgcc tgctctgtgc ctgctctggg ccctggcaat ggtgacccgg cctgcctcag
cggcccccat gggcggccca gaactggcac agcatgagga gctgaccctg ctcttccatg ggaccctgca gctgggccag
gccctcaacg gtgtgtacag gaccacggag ggacggctga caaaggccag gaacagectg ggtctctatg gccgcacaat
agaactcctg gggcaggagg tcagccgggg ccgggatgca gcccaggaac ttcgggcaag cctgttggag actcagatgg
aggaggatat tctgcagctg caggcagagg ccacagctga ggtgctgggg gaggtggccc aggcacagaa ggtgctacgg
gacagcgtgc agcggctaga agtccagctg aggagcgcct ggctgggccc tgcctaccga gaatttgagg tcttaaaggc
tcacgctgac aagcagagcc acatcctatg ggccctcaca ggccacgtgc agcggcagag gcgggagatg gtggcacagc
agcatcggct gcgacagatc caggagagac tccacacagc ggcgctocca gcctgaatct gcctggatgg aactgaggac
caatcatgct gcaaggaaca cttccacgcc ccgtgaggcc cctgtgcagg gaggagctgc ctgttcactg ggatcagcca
gggcgccggg ccccacttct gagcacagag cagagacaga cgcaggcggg gacaaaggca gaggatgtag ccccattggg
gaggggtgga ggaaggacat gtaccctttc atgcctacac acccctcatt aaagcagagt cgtggcatct ca

### Example 4

### In Vitro Knockdown of Human ANGPTL8 in AAV-ANGPTL8 Humanized Mouse Primary Hepatocytes (MPH) with GalNAc-Conjugated ANGPTL8 siRNA

[0131] Knockdown of ANGPTL8 expression by the LYGal1-conjugated ANGPTL8 siRNA was assayed using the following procedure: mouse primary hepatocytes (MPH) were freshly isolated from an AAV-ANGPTL8 humanized mouse, added to Corning 96-well plates at 15,000 cells per well, and siRNA were added directly to the well. For single point (SP) screening, 1 uM (1,000 nM) of GalNAc-conjugated siRNA was used. To generate concentration/dose response curves final concentrations of 1000, 333, 111, 37, 12, 4, 1.37, 0.46, 0.15, 0.05, and 0.017 nM of GalNAc-conjugated siRNA concentration were used. Treated cells were lysed and RNA was isolated using the Quick-RNA 96 Kit (Zymo Research) directly into the 96 well plate. The eluted RNA was used immediately or stored frozen. cDNA was synthesized using Fast Advanced RT Master Mix (Invitrogen) and using the following steps in a thermocycler: 37° C. for 30 minutes, 95 C for 5 minutes, and 4 C hold. Polymerase Chain Reaction (PCR) was performed via TaqMan RT PCR (Life Technologies) using the following cycles temperatures and times: 50° C. for 2 minutes, 95° C. for 10 minutes, 40 cycles of 95° C. for 15 seconds and 60° C. for 1 minute.

[0132] The human ANGPTL8 levels were normalized to mouse Rp1p0 (Life Technologies) and represent the relative knockdown of human ANGPTL8 mRNA expression as compared to vehicle-treated control cells. IC₅₀ values were calculated using a 4-parameter fit model using XLFit.

[0133] Table 5 shows the result of a single dose screen in AAV-ANGPTL8 humanized mouse primary hepatocytes by free uptake with the indicated GalNAc-conjugated ANGPTL8 siRNA. Data were expressed as percent of message knockdown relative to untreated cells. The IC₅₀ and percent maximum knockdown of top hits from single point screening followed by concentration/dose response curves are included as well.

TABLE 5
Percent knockdown of single dose screen and IC₅₀ with percent
maximum knockdown of top hits from single point screen
in AAV-ANGPTL8 humanized mouse primary hepatocytes

| Duplex No: | % KD @ 1 uM | % KD @ 1 uM | IC50 (nM) | Max % KD |
|---|---|---|---|---|
| D: 70 | 94.95 | | 13.04 | 90.99 |
| D: 72 | 94.67 | | 9.27 | 88.82 |
| D: 82 | 94.20 | | 2.01 | 95.81 |
| D: 6 | 93.31 | 91.33 | 4.69 | 93.41 |
| D: 87 | 93.04 | | 28.29 | 71.41 |
| D: 93 | 92.40 | | 10.64 | 85.63 |
| D: 34 | 89.56 | 88.55 | 13.83 | 75.12 |
| D: 92 | 89.39 | | 19.9 | 82.05 |
| D: 51 | 89.13 | 88.34 | 16.1 | 83.12 |
| D: 61 | 87.06 | 82.43 | | |
| D: 73 | 86.51 | | 11.09 | 77.68 |
| D: 19 | 85.54 | 78.46 | | |
| D: 80 | 84.53 | | | |
| D: 36 | 82.20 | 76.47 | 8.51 | 72.37 |
| D: 46 | 81.11 | 77.01 | 24.79 | 79.52 |
| D: 63 | 78.01 | | | |
| D: 86 | 77.65 | | | |
| D: 10 | 77.36 | 69.09 | | |
| D: 47 | 76.94 | 78.71 | | |
| D: 101 | 76.48 | | | |
| D: 98 | 76.16 | | | |
| D: 48 | 74.82 | 72.20 | | |
| D: 4 | 73.16 | 67.97 | | |
| D: 103 | 70.74 | | | |
| D: 90 | 70.67 | | | |
| D: 78 | 70.61 | | | |
| D: 62 | 67.97 | | | |
| D: 64 | 67.48 | | | |
| D: 31 | 67.29 | 68.33 | | |
| D: 67 | 65.86 | | | |
| D: 13 | 64.91 | 50.26 | | |
| D: 27 | 62.73 | 42.21 | | |
| D: 18 | 61.81 | 46.20 | | |
| D: 56 | 59.45 | 63.92 | | |
| D: 26 | 56.02 | 45.27 | | |
| D: 45 | 53.90 | 33.84 | | |
| D: 55 | 52.79 | 47.87 | | |
| D: 24 | 52.33 | 55.12 | | |
| D: 99 | 52.07 | | | |
| D: 30 | 48.47 | 40.63 | | |
| D: 17 | 48.10 | 35.59 | | |
| D: 96 | 47.90 | | | |
| D: 60 | 46.75 | 39.77 | | |
| D: 88 | 46.59 | | | |
| D: 75 | 45.70 | | | |
| D: 20 | 45.58 | 12.43 | | |
| D: 91 | 42.67 | | | |
| D: 52 | 39.83 | 17.25 | | |
| D: 25 | 39.40 | 28.67 | | |
| D: 77 | 39.06 | | | |
| D: 74 | 38.73 | | | |
| D: 89 | 38.09 | | | |
| D: 38 | 36.07 | 11.81 | | |
| D: 68 | 35.74 | | | |
| D: 84 | 35.73 | | | |
| D: 97 | 32.66 | | | |
| D: 29 | 32.63 | 6.98 | | |
| D: 49 | 32.35 | 29.83 | | |
| D: 59 | 30.09 | −3.84 | | |
| D: 50 | 29.67 | 15.48 | | |
| D: 69 | 29.26 | | | |
| D: 53 | 28.66 | 22.18 | | |
| D: 33 | 28.15 | 20.07 | | |
| D: 81 | 26.88 | | | |
| D: 95 | 25.86 | | | |
| D: 65 | 24.04 | | | |
| D: 28 | 23.21 | −4.56 | | |
| D: 71 | 23.01 | | | |
| D: 37 | 22.98 | −4.90 | | |
| D: 41 | 22.70 | −11.81 | | |
| D: 32 | 21.77 | 2.55 | | |
| D: 16 | 20.17 | 18.15 | | |
| D: 100 | 19.82 | | | |
| D: 57 | 19.49 | 4.87 | | |
| D: 21 | 19.30 | −25.71 | | |
| D: 66 | 16.48 | | | |
| D: 102 | 16.31 | | | |
| D: 43 | 16.21 | −12.66 | | |
| D: 40 | 15.69 | 8.32 | | |
| D: 14 | 14.28 | −15.81 | | |
| D: 42 | 14.13 | −3.35 | | |
| D: 83 | 13.98 | | | |
| D: 35 | 13.92 | −6.21 | | |
| D: 54 | 13.10 | −4.76 | | |
| D: 15 | 11.10 | −0.72 | | |
| D: 22 | 10.22 | −17.00 | | |
| D: 76 | 10.21 | | | |
| D: 11 | 6.67 | −8.58 | | |
| D: 12 | 4.20 | −28.78 | | |
| D: 58 | 4.00 | −1.18 | | |
| D: 8 | 3.56 | −14.25 | | |
| D: 23 | 0.43 | −32.92 | | |
| D: 85 | −1.01 | | | |
| D: 94 | −3.35 | | | |
| D: 79 | −6.23 | | | |
| D: 9 | −9.07 | −34.19 | | |
| D: 7 | −16.36 | −17.82 | | |
| D: 39 | −37.59 | −44.25 | | |

### Example 5

### In Vitro Knockdown of Human ANGPTL8 in Hep3B Cells with GalNAc-Conjugated ANGPTL8 siRNA

[0134] Knockdown of ANGPTL8 expression by the LYGal1-conjugated ANGPTL8 siRNA was assayed using the following procedure: transfection reagent RNAiMAX (Life Technologies) at 0.3 μl/well was mixed with siRNA in Corning 96-well plates before adding Hep3B cells (ATCC) at 8,000 cells per well. To generate concentration/dose response curves final concentrations of 100, 33.3, 11.1, 3.7, 1.2, 0.4, 0.137, 0.046, 0.015, 0.005, and 0.0017 nM of GalNAc-conjugated siRNA concentration was used.

[0135] Treated cells are lysed and RNA was isolated using the Quick-RNA 96 Kit (Zymo Research) directly into the 96 well plate. The eluted RNA was used immediately or stored frozen. cDNA was synthesized using Fast Advanced RT Master Mix (Invitrogen) and using the following steps in a thermocycler: 37° C. for 30 minutes, 95° C. for 5 minutes, and 4° C. hold. Polymerase Chain Reaction (PCR) was performed via TaqMan RT PCR (Life Technologies) using the following cycles temperatures and times: 50° C. for 2 minutes, 95° C. for 10 minutes, 40 cycles of 95° C. for 15 seconds and 60° C. for 1 minute.

[0136] The human ANGPTL8 levels were normalized to human RPLP0 (Life Technologies) and represent the relative knockdown of human ANGPTL8 mRNA expression as compared to vehicle-treated control cells. IC₅₀ values were calculated using a 4-parameter fit model using XLFit.

[0137] Table 6 shows the result of IC₅₀ and percent maximum knockdown calculated from concentration/dose response curves in Hep3B cells by transfection with the indicated ANGPTL8 siRNA. In most instances, duplexes resulted in over 90% knockdown, with nanomolar or lower IC₅₀.

TABLE 6
IC₅₀ and percent maximum knockdown of ANGPTL8
message in Hep3B cells by transfection reagent,
RNAiMAX, with the indicated ANGPTL8 siRNA

| Duplex No: | IC50 (nM) | % KD (10 nM) |
|---|---|---|
| D: 172 | 1.140 | 98.73 |
| D: 174 | 0.900 | 90.10 |
| D: 184 | 0.680 | 89.97 |
| D: 109 | 2.070 | 79.44 |
| D: 87 | 0.125 | 98.08 |
| D: 93 | 0.049 | 98.86 |
| D: 195 | 1.400 | 91.33 |
| D: 137 | 2.090 | 100.00 |
| D: 194 | 3.220 | 85.71 |
| D: 153 | 0.950 | 92.82 |
| D: 175 | 3.950 | 66.22 |
| D: 36 | 0.079 | 77.97 |
| D: 148 | 3.110 | 83.93 |
| D: 10 | 0.049 | 94.40 |
| D: 30 | 0.166 | 82.67 |
| D: 68 | 0.034 | 100.00 |
| D: 59 | 0.019 | 98.50 |
| D: 33 | 0.050 | 25.59 |
| D: 65 | 0.101 | 96.12 |
| D: 28 | 0.351 | 29.82 |
| D: 41 | 0.047 | 79.42 |
| D: 100 | 0.033 | 97.47 |
| D: 57 | 0.294 | 94.35 |
| D: 66 | 0.033 | 98.11 |
| D: 43 | 0.144 | 99.37 |
| D: 14 | 0.127 | 79.61 |
| D: 42 | 0.079 | 100.00 |
| D: 35 | 0.113 | 94.88 |
| D: 15 | 0.010 | 94.33 |
| D: 22 | 0.005 | 96.46 |
| D: 76 | 0.328 | 95.66 |
| D: 11 | 0.215 | 98.70 |
| D: 12 | 0.157 | 96.37 |
| D: 58 | 0.081 | 99.78 |
| D: 8 | 0.053 | 89.40 |
| D: 23 | 0.185 | 97.81 |
| D: 85 | 0.180 | 99.86 |
| D: 94 | 0.020 | 99.46 |
| D: 79 | 0.058 | 100.00 |
| D: 9 | 0.026 | 94.52 |
| D: 7 | 0.104 | 100.00 |
| D: 39 | 0.042 | 98.02 |
| D: 105 | 0.285/2.47 | 77.61/53.92 |

### Example 6: In Vivo Single Dose Screen

[0138] GalNAc-siRNA (n=16) were tested in male C57bl/6 mice (Taconic farms). The siRNAs were tested in a single study. Mice were dosed by retro-orbital injection with an adeno-associated virus (AAV) vector containing a plasmid with an albumin promoter and the coding sequence for human ANGPTL8 (NM_018687.7) (Vector BioLabs). Blood was collected from mice via retro-orbital sinus 14 days post AAV administration. Serum was prepared from blood and triglycerides were measured utilizing a COBAS clinical chemistry analyzer (Roche) and ANGPTL4/8 was measured by ELISA (Meso Scale Diagnostics). Body weight of mice were measured 22 days after AAV administration. Mice were assigned to groups with similar body weight, serum triglyceride levels, and serum ANGPTL4/8 (n=6/group). Either PBS or GalNac-siRNA test article, at a dose of 5 mg/kg, was administered subcutaneously to mice. Seven days post subcutaneous injection, blood was collected from all mice and serum is analyzed for triglycerides. Fourteen days post subcutaneous injection mice were euthanized under isoflurane anesthesia, blood was collected, and serum was analyzed for triglycerides. Liver was collected from the mice and frozen in liquid nitrogen. Triglyceride as a percent change from time-matched PBS was calculated as ((triglyceride minus triglyceride of PBS group)/(triglyceride of PBS group))*100. Livers were homogenized in TriZol (Invitrogen) using Lysing Matrix D bead tubes on a FastPrep-24 (MP Bio). Chloroform was added and the aqueous phase is mixed with ethanol to precipitate the RNA. RNA was isolated on columns using PureLink Pro96 Total RNA purification kit (Invitrogen) according to manufacturer's protocol and quantified on a NanoDrop (ThermoFisher). Equal amounts (1 ug) of RNA were reverse transcribed to cDNA using High-Capacity cDNA Reverse Transcription kit (Life Technologies) on Mastercycler Nexus (Eppendorf). Thermocycler settings were 25° C. for 10 min, 37° C. for 2 hrs, then 85° C. for 5 min. Template cDNA was combined with Taqman Universal Master Mix and Assays on Demand primer/probesets and RT-PCR was performed on the QuantStudio Pro7 (ThermoFisher) with the following parameters: 50° C. for 2 min, 95° C. for 10 minutes, then 40 cycles of 95° C. for 15 sec and 60° C. for 1 min. Fold changes (FC) were calculated as follows: the CT value of mouse Rp1p0 was subtracted from CT value of human ANGPTL8 to obtain the delta CT value. Then the delta delta CT value was calculated by subtracting the delta CT value of the untreated sample (average of PBS control) from the delta CT value of each test sample. Fold change was calculated by taking the log base 2 of the negative delta delta CT value. Percent mRNA remaining was calculated multiplying the fold change by 100. Data is shown in Table 7.

TABLE 7
C57 mice hANGPTL8 AAV in vivo single dose screen

| | 7 day, 5 mpk, | 2 wk, 5 mpk, | |
|---|---|---|---|
| | Trigs % Change | Trigs % Change | 2 wk, 5 mpk, |
| Duplex No: | from PBS | from PBS | % mRNA KD |
| D: 172 | −26 | −25 | 90.6 |
| D: 174 | −30 | −36 | 86.7 |
| D: 82 | −43 | −48 | 88.4 |
| D: 184 | −42 | −48 | 90.1 |
| D: 6 | −18 | −34 | 87 |
| D: 109 | −21 | −41 | 83.3 |
| D: 189 | −21 | −16 | 49.8 |
| D: 195 | −46 | −50 | 80.9 |
| D: 137 | −24 | −31 | 82.1 |
| D: 194 | −14 | −22 | 84.2 |
| D: 153 | −23 | −19 | 81.7 |
| D: 175 | −29 | −34 | 82 |
| D: 139 | −35 | −34 | 64.8 |
| D: 148 | −5 | −14 | 82.9 |
| D: 2 | −70 | −85 | 79 |
| D: 105 | −70 | −88 | 81 |

### Example 7: In Vivo Durability 8 Week

[0139] GalNAc-siRNA (n=11) were tested in male mice transgenic for human cholesterol ester transfer protein (CETP) and human apolipoprotein A1 (Taconic farms). The siRNAs were divided and tested in 2 studies (n=7 and n=4). Mice were dosed by retro-orbital injection with two adeno-associated virus (AAV) vectors. One vector contained a plasmid with an albumin promoter and the coding sequence for human ANGPTL8 (NM_018687.7) (Vector BioLabs). The second vector contained a mouse codon optimized sequence of human ANGPTL3 (NP_055310.1) (Vector BioLabs). Blood was collected from mice 3-4 weeks post AAV administration. This was considered the baseline blood collection. Serum was prepared from blood and ANGPTL3/8 was measured by an ELISA (Meso Scale Diagnostics) and triglycerides were measured as described. Body weight of mice was measured and mice were assigned to groups with similar body weight, serum triglyceride, and ANGPTL3/8 levels (n=9/group). 4-5 weeks post AAV administration, either PBS or test article GalNac-siRNA, at doses 1.75 and 10 mg/kg were administered subcutaneously to mice. At 2 weeks post siRNA administration, 3 mice from each group were euthanized under isoflurane anesthesia, blood was collected, and serum was analyzed for triglycerides. Liver was collected from the mice and frozen in liquid nitrogen. Blood was collected from the remaining mice (n=6/group) at 2, 4, and 6 weeks post siRNA administration under isoflurane anesthesia. Serum was prepared from blood and triglycerides are measured. At 8 weeks post siRNA administration, the remaining mice were euthanized under isoflurane anesthesia. Blood and liver were collected from mice. Livers were processed and mRNA remaining was calculated as described in the in vivo single dose screen. Triglyceride as a percent change from PBS is calculated as described in the in vivo single dose screen.

TABLE 8
In vivo Durability 8 week Dose Response (C57 mice hANGPTL8 AAV)

| | 2 Weeks | | | | 3 Weeks | | | 4 Weeks | |
|---|---|---|---|---|---|---|---|---|---|
| | 1.75 | 10 | | | 0.3 | 1.75 | 10 | 1.75 | 10 |
| | mpk, | mpk, | | | mpk, | mpk, | mpk, | mpk, | mpk, |
| | Trigs % | Trigs % | 1.75 | 10 | Trigs % | Trigs % | Trigs % | Trigs % | Trigs % |
| | Change | Change | mpk, | mpk, | Change | Change | Change | Change | Change |
| Duplex | from | from | % mRNA | % mRNA | from | from | from | from | from |
| No: | PBS | PBS | remaining | remaining | PBS | PBS | PBS | PBS | PBS |
| D: 172 | −55 | −79 | 26 | 9 | | | | −54 | −70 |
| D: 174 | −71 | −82 | 20 | 9 | | | | −65 | −80 |
| D: 184 | −74 | −85 | 19 | 7 | | | | −65 | −78 |
| D: 109 | −46 | −71 | 24 | 9 | | | | −47 | −76 |
| D: 195 | −67 | −77 | 16 | 5 | | | | −69 | −83 |
| D: 137 | −69 | −89 | 25 | 7 | | | | −54 | −79 |
| D: 194 | −57 | −71 | 27 | 10 | | | | −45 | −69 |
| D: 153 | −51 | −71 | 38 | 12 | | | | −53 | −62 |
| D: 175 | −59 | −76 | 34 | 13 | | | | −52 | −67 |
| D: 148 | −56 | −75 | 19 | 7 | | | | −39 | −65 |
| D: 4 | | | | | −9 | −27 | −47 | | |
| D: 1 | | | | | −15 | −38 | −73 | | |
| D: 2 | | | | | −28 | −78 | −94 | | |
| D: 105 | −84 | −97 | 25 | 5 | | | | −72 | −94 |
| D: 3 | | | | | −20 | −53 | −80 | | |
| D: 5 | | | | | −20 | −41 | −65 | | |

| | 6 Weeks | | | 8 Weeks | | | |
|---|---|---|---|---|---|---|---|
| | 0.3 | 1.75 | 10 | 1.75 | 10 | | |
| | mpk, | mpk, | mpk, | mpk, | mpk, | | |
| | Trigs % | Trigs % | Trigs % | Trigs % | Trigs % | 1.75 | 10 |
| | Change | Change | Change | Change | Change | mpk, | mpk, |
| Duplex | from | from | from | from | from | % mRNA | % mRNA |
| No: | PBS | PBS | PBS | PBS | PBS | remaining | remaining |
| D: 172 | | −50 | −72 | −40 | −73 | 42 | 14 |
| D: 174 | | −54 | −72 | −54 | −66 | 29 | 23 |
| D: 184 | | −64 | −80 | −51 | −76 | 43 | 18 |
| D: 109 | | −43 | −63 | −46 | −64 | 47 | 16 |
| D: 195 | | −60 | −83 | −54 | −77 | 33 | 7 |
| D: 137 | | −46 | −73 | −35 | −69 | 64 | 23 |
| D: 194 | | −48 | −66 | −33 | −68 | 47 | 18 |
| D: 153 | | −44 | −62 | −50 | −68 | 42 | 22 |
| D: 175 | | −47 | −67 | −37 | −67 | 47 | 22 |
| D: 148 | | −44 | −67 | −33 | −65 | 43 | 18 |
| D: 4 | −12 | −22 | −39 | | | | |
| D: 1 | −12 | −28 | −53 | | | | |
| D: 2 | −21 | −60 | −90 | | | | |
| D: 105 | | −60 | −92 | −55 | −87 | 40 | 6 |
| D: 3 | −5 | −43 | −71 | | | | |
| D: 5 | −6 | −33 | −63 | | | | |

### Example 8: In Vivo Durability 15 Week (Dose Response (C57 Mice hANGPTL8 AAV))

[0140] GalNAc-siRNA (n=5) were tested in male mice transgenic for human cholesterol ester transfer protein (CETP) and human apolipoprotein A1 (Taconic farms). The siRNAs were tested in a single study. Mice were dosed by retro-orbital injection with two adeno-associated virus (AAV) vectors. One vector contained a plasmid with an albumin promoter and the coding sequence for human ANGPTL8(NM_018687.7) (Vector BioLabs). The second vector contained a mouse codon optimized sequence of human ANGPTL3(NP_055310.1) (Vector BioLabs). Blood was collected from mice 3 weeks post AAV administration. This was considered the baseline blood collection. Serum was prepared from blood and triglycerides and ANGPTL3/8 was measured. Body weight of mice was measured and mice were assigned to groups with similar body weight, serum triglyceride and ANGPTL3/8 levels (n=10/group). 4 weeks post AAV administration, either PBS or test article GalNac-siRNA, at doses 0.3, 1.75 and 10 mg/kg were administered subcutaneously to mice. At 2 weeks post siRNA administration, 3 mice from each group were euthanized under isoflurane anesthesia, blood was collected, and serum was analyzed for triglycerides. Liver was collected from the mice and frozen in liquid nitrogen. Blood was collected from the remaining mice (n=7/group) at 3, 6, 9, and 12 weeks post siRNA administration under isoflurane anesthesia. Serum was prepared from blood and triglycerides are measured. At 15 weeks post siRNA administration, the remaining mice were euthanized under isoflurane anesthesia. Blood and liver were collected from mice. Serum was prepared from blood and triglycerides were measured. Livers were processed and mRNA remaining was calculated as described in the in vivo single dose screen. Triglyceride as a percent change from PBS was calculated as described in the in vivo single dose screen.

TABLE 9
Dose Response (C57 mice hANGPTL8 AAV)

| | 3 Weeks | | | 6 Weeks | | | 8 Weeks | | | 9 Weeks | | | 12 Weeks | | |
|---|---|---|---|---|---|---|---|---|---|---|---|---|---|---|---|
| | 0.3 | 1.75 | | 0.3 | 1.75 | 10 | 0.3 | 1.75 | 10 | 0.3 | 1.75 | 10 | 0.3 | 1.75 | 10 |
| | mpk, | mpk, | 10 | mpk, | mpk, | mpk, | mpk, | mpk, | mpk, | mpk, | mpk, | mpk, | mpk, | mpk, | mpk, |
| | Trigs | Trigs | mpk, | Trigs | Trigs | Trigs | Trigs | Trigs | Trigs | Trigs | Trigs | Trigs | Trigs | Trigs | Trigs |
| | % | % | % | % | % | % | % | % | % | % | % | % | % | % | % |
| Du- | Change | Change | mRNA | Change | Change | Change | Change | Change | Change | Change | Change | Change | Change | Change | Change |
| plex | from | from | remain- | from | from | from | from | from | from | from | from | from | from | from | from |
| NO: | PBS | PBS | ing | PBS | PBS | PBS | PBS | PBS | PBS | PBS | PBS | PBS | PBS | PBS | PBS |
| D: 1 | −15 | −38 | −73 | −12 | −28 | −53 | 8 | −19 | −51 | −20 | −23 | −42 | −11 | −9 | −22 |
| D: 2 | −28 | −78 | −94 | −21 | −60 | −90 | 9 | −54 | −82 | −18 | −49 | −79 | 6 | −25 | −68 |
| D: 3 | −20 | −53 | −80 | −5 | −43 | −71 | 4 | −12 | −61 | −18 | −31 | −59 | −8 | 3 | −35 |
| D: 4 | −20 | −41 | −65 | −6 | −33 | −63 | 20 | 1 | −36 | −13 | −24 | −59 | 0 | 9 | −24 |
| D: 5 | −9 | −27 | −47 | −12 | −22 | −39 | 12 | 12 | −42 | −13 | −24 | −31 | 32 | −16 | −12 |

1. An RNAi agent for reducing ANGPTL8 gene expression, wherein the RNAi agent comprises a delivery moiety of Formula I conjugated to R, wherein R is a double stranded RNA (dsRNA) comprising an antisense strand and a sense strand: [chemical structure]
wherein R is conjugated to connection point E of Formula I, optionally via a linker, wherein the sense strand and the antisense strand form a duplex region, and wherein the antisense strand comprises any one of SEQ ID NOs: 6, 7, 8, 9, 10, 11, 12, 13, 14, or 15, or a sequence having 90% sequence identity thereto, or an antisense strand sequence as set forth in Tables 3A, 3B, and 4 or a sequence having 90% sequence identity thereto, and wherein the sense and antisense strand each optionally comprise one or more modified nucleotides and optionally one or more modified internucleotide linkages.

2. The RNAi agent of claim 1, wherein Formula I is conjugated to the sense strand, optionally via a linker.

3. The RNAi agent of claim 2, wherein Formula I is conjugated to the 3′ terminal nucleotide of the sense strand, optionally via a linker.

4. The RNAi agent of claim 1, wherein the sense strand is 15 to 25 nucleotides in length.

5. The RNAi agent of claim 1, wherein the antisense strand is between 18 and 23 nucleotides in length.

6. The RNAi agent of claim 1, wherein the sense strand is between 18 and 21 nucleotides in length.

7. The RNAi agent of claim 1, wherein the antisense strand is 23 nucleotides in length and the sense strand is 21 nucleotides in length.

8. The RNAi agent of claim 1, wherein the sense strand and the antisense strand form a region of complementarity of at least 18 nucleotides in length.

9. The RNAi agent of claim 1, wherein the duplex region between the sense strand and the antisense strand comprises 0, 1, or 2 mismatches between the sense strand and the antisense strand.

10. The RNAi agent of claim 1, wherein the duplex region between the sense strand and the antisense strand comprises 0 mismatches between the sense strand and the antisense strand.

11. The RNAi agent of claim 1, wherein the antisense strand comprises 15 contiguous nucleotides of any one of SEQ ID NOs: 6, 7, 8, 9, 10, 11, 12, 13, 14, or 15, or a sequence of Tables 3A, 3B, and 4.

12. The RNAi agent of claim 1, wherein the antisense strand comprises 18 contiguous nucleotides of any one of SEQ ID NOs: 6, 7, 8, 9, 10, 11, 12, 13, 14, or 15, or a sequence of Tables 3A, 3B, and 4.

13. The RNAi agent of claim 1, wherein the sense strand is selected from the group consisting of SEQ ID NOs: 1 to 5, or a sequence having at least 90% sequence identity thereto, or a sense strand sequence set forth in Table 3, or a sequence having 90% sequence identity thereto.

14. The RNAi agent of claim 1, wherein the sense strand or the antisense strand each independently comprise one or more modified nucleotides.

15. The RNAi agent of claim 1, wherein each nucleotide of the sense strand and each nucleotide of the antisense strand is a modified nucleotide, and the modified nucleotides are independently 2′ fluoro modified nucleotide residues or 2′-O-methyl modified nucleotides.

16. The RNAi agent of claim 1, wherein the antisense strand is 23 nucleotides in length and wherein each nucleotide of the antisense strand is a modified nucleotide, and wherein the position of the 2′ fluoro modified nucleotides is modified to be present at a group of positions selected from the following:
a. Positions 2, 3, 7, 14, and 16 from the 5′ end of the antisense strand; or
b. Positions 2, 5, 7, 14, and 16 from the 5′ end of the antisense strand; or
c. Positions 2, 3, 8, 14, and 16 from the 5′ end of the antisense strand; or
d. Positions 2, 5, 8, 14, and 16 from the 5′ end of the antisense strand; or
e. Positions 2, 6, 14, and 16 from the 5′ end of the antisense strand.

17. The RNAi agent of claim 1, wherein the sense strand and antisense strand each independently comprise one or more modified internucleotide linkages, and wherein each modified internucleotide linkage is a phosphorothioate linkage.

18. The RNAi agent of claim 1, wherein the sense strand and antisense strand each independently comprise four phosphorothioate linkages.

19. The RNAi agent of claim 1, wherein the 5′ terminal nucleotide of the antisense strand comprises an OH group, a phosphate group, a vinyl phosphonate, or a phosphate analog.

20. The RNAi agent of claim 19, wherein the 5′ terminal nucleotide of the antisense strand is further modified to replace the 5′ phosphate group with an OH group.

21. The RNAi agent of claim 1, wherein R is conjugated to Formula I via a linker.

22. The RNAi agent of claim 1, wherein R is conjugated to Formula I via a linker, and wherein linker comprises a linker of Formula II having connection points A and B or the linker comprises Formula III having connection points C and D, and wherein: [chemical structure]
a. Formula I, at connection point E, is conjugated to Formula II at connection point A and Formula II is conjugated to a phosphate group or a phosphorothioate group at connection point B, and the phosphate group or phosphorothioate group is further conjugated to R; or
b. Formula I, at connection point E, is conjugated to Formula III at connection point C and Formula III is conjugated to a phosphate group or phosphorothioate group at connection point D, and the phosphate group or phosphorothioate group is further conjugated to R.

23. The RNAi agent of claim 1, wherein R is conjugated to Formula I via a linker, and wherein the linker is a linker comprising Formula III having connection points C and D: [chemical structure]
and wherein Formula I, at connection point E, is conjugated to Formula III at connection point C and Formula III is conjugated to a phosphate group or a phosphorothioate group at connection point D, and the phosphate group or the phosphorothioate group is further conjugated to R.

24. (canceled)

25. (canceled)

26. (canceled)

27. (canceled)

28. A pharmaceutical composition comprising the RNAi agent of claim 1, and one or more pharmaceutically acceptable excipients.

29. (canceled)

30. (canceled)

31. A method of treating dyslipidemia in a patient in need thereof, comprising administering the RNAi agent of claim 1, or a pharmaceutical composition thereof, to the patient.

32. (canceled)

33. (canceled)

The application's sequence listing, which the Patent Office published only in electronic form, follows.

SEQUENCE LISTING (511 sequences)

SEQ ID NO: 1 - RNA, 21 nt, synthetic construct
  source 1..21: mol_type = other RNA
  modified_base 1: mod_base = OTHER; note = 2'-O-methyladenosine with a 3'-phosphorothioate linkage
  modified_base 2: mod_base = OTHER; note = 2'-O-methylguanosine with a 3'-phosphorothioate linkage
  modified_base 3: mod_base = cm
  modified_base 4: mod_base = OTHER; note = 2'-O-methyladenosine
  modified_base 5: mod_base = gm
  modified_base 6: mod_base = cm
  modified_base 7: mod_base = OTHER; note = 2'-O-methyladenosine
  modified_base 8: mod_base = um
  modified_base 9: mod_base = OTHER; note = 2'-fluorocytidine
  modified_base 10: mod_base = OTHER; note = 2'-fluoroguanosine
  modified_base 11: mod_base = OTHER; note = 2'-fluoroguanosine
  modified_base 12: mod_base = cm
  modified_base 13: mod_base = um
  modified_base 14: mod_base = gm
  modified_base 15: mod_base = cm
  modified_base 16: mod_base = gm
  modified_base 17: mod_base = OTHER; note = 2'-O-methyladenosine
  modified_base 18: mod_base = cm
  modified_base 19: mod_base = OTHER; note = 2'-O-methyladenosine with a 3'-phosphorothioate linkage
  modified_base 20: mod_base = OTHER; note = 2'-O-methylguanosine with a 3'-phosphorothioate linkage
  modified_base 21: mod_base = OTHER; note = 2'-O-methyladenosine
agcagcatcggctgcgacaga

SEQ ID NO: 2 - RNA, 21 nt, synthetic construct
  source 1..21: mol_type = other RNA
  modified_base 1: mod_base = OTHER; note = 2'-O-methylguanosine with a 3'-phosphorothioate linkage
  modified_base 2: mod_base = OTHER; note = 2'-O-methylguanosine with a 3'-phosphorothioate linkage
  modified_base 3: mod_base = OTHER; note = 2'-O-methyladenosine
  modified_base 4: mod_base = gm
  modified_base 5: mod_base = cm
  modified_base 6: mod_base = um
  modified_base 7: mod_base = gm
  modified_base 8: mod_base = OTHER; note = 2'-O-methyladenosine
  modified_base 9: mod_base = OTHER; note = 2'-fluorocytidine
  modified_base 10: mod_base = OTHER; note = 2'-fluorocytidine
  modified_base 11: mod_base = OTHER; note = 2'-fluorocytidine
  modified_base 12: mod_base = um
  modified_base 13: mod_base = gm
  modified_base 14: mod_base = cm
  modified_base 15: mod_base = um
  modified_base 16: mod_base = cm
  modified_base 17: mod_base = um
  modified_base 18: mod_base = um
  modified_base 19: mod_base = OTHER; note = 2'-O-methylcytidine with a 3'-phosphorothioate linkage
  modified_base 20: mod_base = OTHER; note = 2'-O-methylcytidine with a 3'-phosphorothioate linkage
  modified_base 21: mod_base = OTHER; note = 2'-O-methyladenosine
ggagctgaccctgctcttcca

SEQ ID NO: 3 - RNA, 21 nt, synthetic construct
  source 1..21: mol_type = other RNA
  modified_base 1: mod_base = OTHER; note = 2'-O-methylguanosine with a 3'-phosphorothioate linkage
  modified_base 2: mod_base = OTHER; note = 2'-O-methyladenosine with a 3'-phosphorothioate linkage
  modified_base 3: mod_base = cm
  modified_base 4: mod_base = um
  modified_base 5: mod_base = cm
  modified_base 6: mod_base = OTHER; note = 2'-O-methyladenosine
  modified_base 7: mod_base = gm
  modified_base 8: mod_base = OTHER; note = 2'-O-methyladenosine
  modified_base 9: mod_base = OTHER; note = 2'-fluorouridine
  modified_base 10: mod_base = OTHER; note = 2'-fluoroguanosine
  modified_base 11: mod_base = OTHER; note = 2'-fluoroguanosine
  modified_base 12: mod_base = OTHER; note = 2'-O-methyladenosine
  modified_base 13: mod_base = gm
  modified_base 14: mod_base = gm
  modified_base 15: mod_base = OTHER; note = 2'-O-methyladenosine
  modified_base 16: mod_base = gm
  modified_base 17: mod_base = gm
  modified_base 18: mod_base = OTHER; note = 2'-O-methyladenosine
  modified_base 19: mod_base = OTHER; note = 2'-O-methyluridine with a 3'-phosphorothioate linkage
  modified_base 20: mod_base = OTHER; note = 2'-O-methyladenosine with a 3'-phosphorothioate linkage
  modified_base 21: mod_base = um
gactcagatggaggaggatat

SEQ ID NO: 4 - RNA, 21 nt, synthetic construct
  source 1..21: mol_type = other RNA
  modified_base 1: mod_base = OTHER; note = 2'-O-methylcytidine with a 3'-phosphorothioate linkage
  modified_base 2: mod_base = OTHER; note = 2'-O-methyluridine with a 3'-phosphorothioate linkage
  modified_base 3: mod_base = um
  modified_base 4: mod_base = OTHER; note = 2'-O-methyladenosine
  modified_base 5: mod_base = OTHER; note = 2'-O-methyladenosine
  modified_base 6: mod_base = OTHER; note = 2'-O-methyladenosine
  modified_base 7: mod_base = gm
  modified_base 8: mod_base = gm
  modified_base 9: mod_base = OTHER; note = 2'-fluorocytidine
  modified_base 10: mod_base = OTHER; note = 2'-fluorouridine
  modified_base 11: mod_base = OTHER; note = 2'-fluorocytidine
  modified_base 12: mod_base = OTHER; note = 2'-O-methyladenosine
  modified_base 13: mod_base = cm
  modified_base 14: mod_base = gm
  modified_base 15: mod_base = cm
  modified_base 16: mod_base = um
  modified_base 17: mod_base = gm
  modified_base 18: mod_base = OTHER; note = 2'-O-methyladenosine
  modified_base 19: mod_base = OTHER; note = 2'-O-methylcytidine with a 3'-phosphorothioate linkage
  modified_base 20: mod_base = OTHER; note = 2'-O-methyladenosine with a 3'-phosphorothioate linkage
  modified_base 21: mod_base = OTHER; note = 2'-O-methyladenosine
cttaaaggctcacgctgacaa

SEQ ID NO: 5 - RNA, 21 nt, synthetic construct
  source 1..21: mol_type = other RNA
  modified_base 1: mod_base = OTHER; note = 2'-O-methyladenosine with a 3'-phosphorothioate linkage
  modified_base 2: mod_base = OTHER; note = 2'-O-methyladenosine with a 3'-phosphorothioate linkage
  modified_base 3: mod_base = gm
  modified_base 4: mod_base = cm
  modified_base 5: mod_base = cm
  modified_base 6: mod_base = um
  modified_base 7: mod_base = gm
  modified_base 8: mod_base = um
  modified_base 9: mod_base = OTHER; note = 2'-fluorouridine
  modified_base 10: mod_base = OTHER; note = 2'-fluoroguanosine
  modified_base 11: mod_base = OTHER; note = 2'-fluoroguanosine
  modified_base 12: mod_base = OTHER; note = 2'-O-methyladenosine
  modified_base 13: mod_base = gm
  modified_base 14: mod_base = OTHER; note = 2'-O-methyladenosine
  modified_base 15: mod_base = cm
  modified_base 16: mod_base = um
  modified_base 17: mod_base = cm
  modified_base 18: mod_base = OTHER; note = 2'-O-methyladenosine
  modified_base 19: mod_base = OTHER; note = 2'-O-methylguanosine with a 3'-phosphorothioate linkage
  modified_base 20: mod_base = OTHER; note = 2'-O-methyladenosine with a 3'-phosphorothioate linkage
  modified_base 21: mod_base = um
aagcctgttggagactcagat

SEQ ID NO: 6 - RNA, 23 nt, synthetic construct
  source 1..23: mol_type = other RNA
  modified_base 1: mod_base = OTHER; note = 2'-O-methyluridine with a 3'-phosphorothioate linkage and a 5'-phosphate substitution
  modified_base 2: mod_base = OTHER; note = 2'-fluorocytidine with a 3'-phosphorothioate linkage
  modified_base 3: mod_base = um
  modified_base 4: mod_base = gm
  modified_base 5: mod_base = OTHER; note = 2'-fluorouridine
  modified_base 6: mod_base = cm
  modified_base 7: mod_base = OTHER; note = 2'-fluoroguanosine
  modified_base 8: mod_base = cm
  modified_base 9: mod_base = OTHER; note = 2'-O-methyladenosine
  modified_base 10: mod_base = gm
  modified_base 11: mod_base = cm
  modified_base 12: mod_base = cm
  modified_base 13: mod_base = gm
  modified_base 14: mod_base = OTHER; note = 2'-fluoroadenosine
  modified_base 15: mod_base = um
  modified_base 16: mod_base = OTHER; note = 2'-fluoroguanosine
  modified_base 17: mod_base = cm
  modified_base 18: mod_base = um
  modified_base 19: mod_base = gm
  modified_base 20: mod_base = cm
  modified_base 21: mod_base = OTHER; note = 2'-O-methyluridine with a 3'-phosphorothioate linkage
  modified_base 22: mod_base = OTHER; note = 2'-O-methylguanosine with a 3'-phosphorothioate linkage
  modified_base 23: mod_base = um
tctgtcgcagccgatgctgctgt

SEQ ID NO: 7 - RNA, 23 nt, synthetic construct
  source 1..23: mol_type = other RNA
  modified_base 1: mod_base = OTHER; note = 2'-O-methyluridine with a 3'-phosphorothioate linkage and a 5'-phosphate substitution
  modified_base 2: mod_base = OTHER; note = 2'-fluoroguanosine with a 3'-phosphorothioate linkage
  modified_base 3: mod_base = gm
  modified_base 4: mod_base = OTHER; note = 2'-O-methyladenosine
  modified_base 5: mod_base = OTHER; note = 2'-fluoroadenosine
  modified_base 6: mod_base = gm
  modified_base 7: mod_base = OTHER; note = 2'-fluoroadenosine
  modified_base 8: mod_base = gm
  modified_base 9: mod_base = cm
  modified_base 10: mod_base = OTHER; note = 2'-O-methyladenosine
  modified_base 11: mod_base = gm
  modified_base 12: mod_base = gm
  modified_base 13: mod_base = gm
  modified_base 14: mod_base = OTHER; note = 2'-fluorouridine
  modified_base 15: mod_base = cm
  modified_base 16: mod_base = OTHER; note = 2'-fluoroadenosine
  modified_base 17: mod_base = gm
  modified_base 18: mod_base = cm
  modified_base 19: mod_base = um
  modified_base 20: mod_base = cm
  modified_base 21: mod_base = OTHER; note = 2'-O-methylcytidine with a 3'-phosphorothioate linkage
  modified_base 22: mod_base = OTHER; note = 2'-O-methyluridine with a 3'-phosphorothioate linkage
  modified_base 23: mod_base = cm
tggaagagcagggtcagctcctc

SEQ ID NO: 8 - RNA, 23 nt, synthetic construct
  source 1..23: mol_type = other RNA
  modified_base 1: mod_base = OTHER; note = 2'-O-methyladenosine with a 3'-phosphorothioate linkage and a 5'-phosphate substitution
  modified_base 2: mod_base = OTHER; note = 2'-fluorouridine with a 3'-phosphorothioate linkage
  modified_base 3: mod_base = OTHER; note = 2'-O-methyladenosine
  modified_base 4: mod_base = um
  modified_base 5: mod_base = OTHER; note = 2'-fluorocytidine
  modified_base 6: mod_base = cm
  modified_base 7: mod_base = OTHER; note = 2'-fluorouridine
  modified_base 8: mod_base = cm
  modified_base 9: mod_base = cm
  modified_base 10: mod_base = um
  modified_base 11: mod_base = cm
  modified_base 12: mod_base = cm
  modified_base 13: mod_base = OTHER; note = 2'-O-methyladenosine
  modified_base 14: mod_base = OTHER; note = 2'-fluorouridine
  modified_base 15: mod_base = cm
  modified_base 16: mod_base = OTHER; note = 2'-fluorouridine
  modified_base 17: mod_base = gm
  modified_base 18: mod_base = OTHER; note = 2'-O-methyladenosine
  modified_base 19: mod_base = gm
  modified_base 20: mod_base = um
  modified_base 21: mod_base = OTHER; note = 2'-O-methylcytidine with a 3'-phosphorothioate linkage
  modified_base 22: mod_base = OTHER; note = 2'-O-methyluridine with a 3'-phosphorothioate linkage
  modified_base 23: mod_base = cm
atatcctcctccatctgagtctc

SEQ ID NO: 9 - RNA, 23 nt, synthetic construct
  source 1..23: mol_type = other RNA
  modified_base 1: mod_base = OTHER; note = 2'-O-methyluridine with a 3'-phosphorothioate linkage and a 5'-phosphate substitution
  modified_base 2: mod_base = OTHER; note = 2'-fluorouridine with a 3'-phosphorothioate linkage
  modified_base 3: mod_base = gm
  modified_base 4: mod_base = um
  modified_base 5: mod_base = OTHER; note = 2'-fluorocytidine
  modified_base 6: mod_base = OTHER; note = 2'-O-methyladenosine
  modified_base 7: mod_base = OTHER; note = 2'-fluoroguanosine
  modified_base 8: mod_base = cm
  modified_base 9: mod_base = gm
  modified_base 10: mod_base = um
  modified_base 11: mod_base = gm
  modified_base 12: mod_base = OTHER; note = 2'-O-methyladenosine
  modified_base 13: mod_base = gm
  modified_base 14: mod_base = OTHER; note = 2'-fluorocytidine
  modified_base 15: mod_base = cm
  modified_base 16: mod_base = OTHER; note = 2'-fluorouridine
  modified_base 17: mod_base = um
  modified_base 18: mod_base = um
  modified_base 19: mod_base = OTHER; note = 2'-O-methyladenosine
  modified_base 20: mod_base = OTHER; note = 2'-O-methyladenosine
  modified_base 21: mod_base = OTHER; note = 2'-O-methylguanosine with a 3'-phosphorothioate linkage
  modified_base 22: mod_base = OTHER; note = 2'-O-methyladenosine with a 3'-phosphorothioate linkage
  modified_base 23: mod_base = cm
ttgtcagcgtgagcctttaagac

SEQ ID NO: 10 - RNA, 23 nt, synthetic construct
  source 1..23: mol_type = other RNA
  modified_base 1: mod_base = OTHER; note = 2'-O-methyladenosine with a 3'-phosphorothioate linkage and a 5'-phosphate substitution
  modified_base 2: mod_base = OTHER; note = 2'-fluorouridine with a 3'-phosphorothioate linkage
  modified_base 3: mod_base = cm
  modified_base 4: mod_base = um
  modified_base 5: mod_base = OTHER; note = 2'-fluoroguanosine
  modified_base 6: mod_base = OTHER; note = 2'-O-methyladenosine
  modified_base 7: mod_base = OTHER; note = 2'-fluoroguanosine
  modified_base 8: mod_base = um
  modified_base 9: mod_base = cm
  modified_base 10: mod_base = um
  modified_base 11: mod_base = cm
  modified_base 12: mod_base = cm
  modified_base 13: mod_base = OTHER; note = 2'-O-methyladenosine
  modified_base 14: mod_base = OTHER; note = 2'-fluoroadenosine
  modified_base 15: mod_base = cm
  modified_base 16: mod_base = OTHER; note = 2'-fluoroadenosine
  modified_base 17: mod_base = gm
  modified_base 18: mod_base = gm
  modified_base 19: mod_base = cm
  modified_base 20: mod_base = um
  modified_base 21: mod_base = OTHER; note = 2'-O-methyluridine with a 3'-phosphorothioate linkage
  modified_base 22: mod_base = OTHER; note = 2'-O-methylguanosine with a 3'-phosphorothioate linkage
  modified_base 23: mod_base = cm
atctgagtctccaacaggcttgc

SEQ ID NO: 11 - RNA, 23 nt, synthetic construct
  source 1..23: mol_type = other RNA
  modified_base 1: mod_base = OTHER; note = 2'-O-methyluridine with a 3'-phosphorothioate linkage
  modified_base 2: mod_base = OTHER; note = 2'-fluorocytidine with a 3'-phosphorothioate linkage
  modified_base 3: mod_base = um
  modified_base 4: mod_base = gm
  modified_base 5: mod_base = OTHER; note = 2'-fluorouridine
  modified_base 6: mod_base = cm
  modified_base 7: mod_base = OTHER; note = 2'-fluoroguanosine
  modified_base 8: mod_base = cm
  modified_base 9: mod_base = OTHER; note = 2'-O-methyladenosine
  modified_base 10: mod_base = gm
  modified_base 11: mod_base = cm
  modified_base 12: mod_base = cm
  modified_base 13: mod_base = gm
  modified_base 14: mod_base = OTHER; note = 2'-fluoroadenosine
  modified_base 15: mod_base = um
  modified_base 16: mod_base = OTHER; note = 2'-fluoroguanosine
  modified_base 17: mod_base = cm
  modified_base 18: mod_base = um
  modified_base 19: mod_base = gm
  modified_base 20: mod_base = cm
  modified_base 21: mod_base = OTHER; note = 2'-O-methyluridine with a 3'-phosphorothioate linkage
  modified_base 22: mod_base = OTHER; note = 2'-O-methylguanosine with a 3'-phosphorothioate linkage
  modified_base 23: mod_base = um
tctgtcgcagccgatgctgctgt

SEQ ID NO: 12 - RNA, 23 nt, synthetic construct
  source 1..23: mol_type = other RNA
  modified_base 1: mod_base = OTHER; note = 2'-O-methyluridine with a 3'-phosphorothioate linkage
  modified_base 2: mod_base = OTHER; note = 2'-fluoroguanosine with a 3'-phosphorothioate linkage
  modified_base 3: mod_base = gm
  modified_base 4: mod_base = OTHER; note = 2'-O-methyladenosine
  modified_base 5: mod_base = OTHER; note = 2'-fluoroadenosine
  modified_base 6: mod_base = gm
  modified_base 7: mod_base = OTHER; note = 2'-fluoroadenosine
  modified_base 8: mod_base = gm
  modified_base 9: mod_base = cm
  modified_base 10: mod_base = OTHER; note = 2'-O-methyladenosine
  modified_base 11: mod_base = gm
  modified_base 12: mod_base = gm
  modified_base 13: mod_base = gm
  modified_base 14: mod_base = OTHER; note = 2'-fluorouridine
  modified_base 15: mod_base = cm
  modified_base 16: mod_base = OTHER; note = 2'-fluoroadenosine
  modified_base 17: mod_base = gm
  modified_base 18: mod_base = cm
  modified_base 19: mod_base = um
  modified_base 20: mod_base = cm
  modified_base 21: mod_base = OTHER; note = 2'-O-methylcytidine with a 3'-phosphorothioate linkage
  modified_base 22: mod_base = OTHER; note = 2'-O-methyluridine with a 3'-phosphorothioate linkage
  modified_base 23: mod_base = cm
tggaagagcagggtcagctcctc

SEQ ID NO: 13 - RNA, 23 nt, synthetic construct
  source 1..23: mol_type = other RNA
  modified_base 1: mod_base = OTHER; note = 2'-O-methyladenosine with a 3'-phosphorothioate linkage
  modified_base 2: mod_base = OTHER; note = 2'-fluorouridine with a 3'-phosphorothioate linkage
  modified_base 3: mod_base = OTHER; note = 2'-O-methyladenosine
  modified_base 4: mod_base = um
  modified_base 5: mod_base = OTHER; note = 2'-fluorocytidine
  modified_base 6: mod_base = cm
  modified_base 7: mod_base = OTHER; note = 2'-fluorouridine
  modified_base 8: mod_base = cm
  modified_base 9: mod_base = cm
  modified_base 10: mod_base = um
  modified_base 11: mod_base = cm
  modified_base 12: mod_base = cm
  modified_base 13: mod_base = OTHER; note = 2'-O-methyladenosine
  modified_base 14: mod_base = OTHER; note = 2'-fluorouridine
  modified_base 15: mod_base = cm
  modified_base 16: mod_base = OTHER; note = 2'-fluorouridine
  modified_base 17: mod_base = gm
  modified_base 18: mod_base = OTHER; note = 2'-O-methyladenosine
  modified_base 19: mod_base = gm
  modified_base 20: mod_base = um
  modified_base 21: mod_base = OTHER; note = 2'-O-methylcytidine with a 3'-phosphorothioate linkage
  modified_base 22: mod_base = OTHER; note = 2'-O-methyluridine with a 3'-phosphorothioate linkage
  modified_base 23: mod_base = cm
atatcctcctccatctgagtctc

SEQ ID NO: 14 - RNA, 23 nt, synthetic construct
  source 1..23: mol_type = other RNA
  modified_base 1: mod_base = OTHER; note = 2'-O-methyluridine with a 3'-phosphorothioate linkage
  modified_base 2: mod_base = OTHER; note = 2'-fluorouridine with a 3'-phosphorothioate linkage
  modified_base 3: mod_base = gm
  modified_base 4: mod_base = um
  modified_base 5: mod_base = OTHER; note = 2'-fluorocytidine
  modified_base 6: mod_base = OTHER; note = 2'-O-methyladenosine
  modified_base 7: mod_base = OTHER; note = 2'-fluoroguanosine
  modified_base 8: mod_base = cm
  modified_base 9: mod_base = gm
  modified_base 10: mod_base = um
  modified_base 11: mod_base = gm
  modified_base 12: mod_base = OTHER; note = 2'-O-methyladenosine
  modified_base 13: mod_base = gm
  modified_base 14: mod_base = OTHER; note = 2'-fluorocytidine
  modified_base 15: mod_base = cm
  modified_base 16: mod_base = OTHER; note = 2'-fluorouridine
  modified_base 17: mod_base = um
  modified_base 18: mod_base = um
  modified_base 19: mod_base = OTHER; note = 2'-O-methyladenosine
  modified_base 20: mod_base = OTHER; note = 2'-O-methyladenosine
  modified_base 21: mod_base = OTHER; note = 2'-O-methylguanosine with a 3'-phosphorothioate linkage
  modified_base 22: mod_base = OTHER; note = 2'-O-methyladenosine with a 3'-phosphorothioate linkage
  modified_base 23: mod_base = cm
ttgtcagcgtgagcctttaagac

SEQ ID NO: 15 - RNA, 23 nt, synthetic construct
  source 1..23: mol_type = other RNA
  modified_base 1: mod_base = OTHER; note = 2'-O-methyladenosine with a 3'-phosphorothioate linkage
  modified_base 2: mod_base = OTHER; note = 2'-fluorouridine with a 3'-phosphorothioate linkage
  modified_base 3: mod_base = cm
  modified_base 4: mod_base = um
  modified_base 5: mod_base = OTHER; note = 2'-fluoroguanosine
  modified_base 6: mod_base = OTHER; note = 2'-O-methyladenosine
  modified_base 7: mod_base = OTHER; note = 2'-fluoroguanosine
  modified_base 8: mod_base = um
  modified_base 9: mod_base = cm
  modified_base 10: mod_base = um
  modified_base 11: mod_base = cm
  modified_base 12: mod_base = cm
  modified_base 13: mod_base = OTHER; note = 2'-O-methyladenosine
  modified_base 14: mod_base = OTHER; note = 2'-fluoroadenosine
  modified_base 15: mod_base = cm
  modified_base 16: mod_base = OTHER; note = 2'-fluoroadenosine
  modified_base 17: mod_base = gm
  modified_base 18: mod_base = gm
  modified_base 19: mod_base = cm
  modified_base 20: mod_base = um
  modified_base 21: mod_base = OTHER; note = 2'-O-methyluridine with a 3'-phosphorothioate linkage
  modified_base 22: mod_base = OTHER; note = 2'-O-methylguanosine with a 3'-phosphorothioate linkage
  modified_base 23: mod_base = cm
atctgagtctccaacaggcttgc

SEQ ID NO: 16 - RNA, 21 nt, synthetic construct
  source 1..21: mol_type = other RNA
  modified_base 1: mod_base = OTHER; note = 2'-O-methyluridine with a 3'-phosphorothioate linkage
  modified_base 2: mod_base = OTHER; note = 2'-O-methylcytidine with a 3'-phosphorothioate linkage
  modified_base 3: mod_base = gm
  modified_base 4: mod_base = gm
  modified_base 5: mod_base = gm
  modified_base 6: mod_base = cm
  modified_base 7: mod_base = OTHER; note = 2'-O-methyladenosine
  modified_base 8: mod_base = OTHER; note = 2'-O-methyladenosine
  modified_base 9: mod_base = OTHER; note = 2'-fluoroguanosine
  modified_base 10: mod_base = OTHER; note = 2'-fluorocytidine
  modified_base 11: mod_base = OTHER; note = 2'-fluorocytidine
  modified_base 12: mod_base = um
  modified_base 13: mod_base = gm
  modified_base 14: mod_base = um
  modified_base 15: mod_base = um
  modified_base 16: mod_base = gm
  modified_base 17: mod_base = gm
  modified_base 18: mod_base = OTHER; note = 2'-O-methyladenosine
  modified_base 19: mod_base = OTHER; note = 2'-O-methylguanosine with a 3'-phosphorothioate linkage
  modified_base 20: mod_base = OTHER; note = 2'-O-methyladenosine with a 3'-phosphorothioate linkage
  modified_base 21: mod_base = OTHER; note = 2'-O-methyladenosine
tcgggcaagcctgttggagaa

SEQ ID NO: 17 - RNA, 21 nt, synthetic construct
  source 1..21: mol_type = other RNA
  modified_base 1: mod_base = OTHER; note = 2'-O-methyladenosine with a 3'-phosphorothioate linkage
  modified_base 2: mod_base = OTHER; note = 2'-O-methyladenosine with a 3'-phosphorothioate linkage
  modified_base 3: mod_base = um
  modified_base 4: mod_base = cm
  modified_base 5: mod_base = um
  modified_base 6: mod_base = gm
  modified_base 7: mod_base = cm
  modified_base 8: mod_base = cm
  modified_base 9: mod_base = OTHER; note = 2'-fluorouridine
  modified_base 10: mod_base = OTHER; note = 2'-fluoroguanosine
  modified_base 11: mod_base = OTHER; note = 2'-fluoroguanosine
  modified_base 12: mod_base = OTHER; note = 2'-O-methyladenosine
  modified_base 13: mod_base = um
  modified_base 14: mod_base = gm
  modified_base 15: mod_base = gm
  modified_base 16: mod_base = OTHER; note = 2'-O-methyladenosine
  modified_base 17: mod_base = OTHER; note = 2'-O-methyladenosine
  modified_base 18: mod_base = cm
  modified_base 19: mod_base = OTHER; note = 2'-O-methyluridine with a 3'-phosphorothioate linkage
  modified_base 20: mod_base = OTHER; note = 2'-O-methylguanosine with a 3'-phosphorothioate linkage
  modified_base 21: mod_base = OTHER; note = 2'-O-methyladenosine
aatctgcctggatggaactga

SEQ ID NO: 18 - RNA, 21 nt, synthetic construct
  source 1..21: mol_type = other RNA
  modified_base 1: mod_base = OTHER; note = 2'-O-methylcytidine with a 3'-phosphorothioate linkage
  modified_base 2: mod_base = OTHER; note = 2'-O-methylcytidine with a 3'-phosphorothioate linkage
  modified_base 3: mod_base = um
  modified_base 4: mod_base = gm
  modified_base 5: mod_base = gm
  modified_base 6: mod_base = OTHER; note = 2'-O-methyladenosine
  modified_base 7: mod_base = um
  modified_base 8: mod_base = gm
  modified_base 9: mod_base = OTHER; note = 2'-fluoroguanosine
  modified_base 10: mod_base = OTHER; note = 2'-fluoroadenosine
  modified_base 11: mod_base = OTHER; note = 2'-fluoroadenosine
  modified_base 12: mod_base = cm
  modified_base 13: mod_base = um
  modified_base 14: mod_base = gm
  modified_base 15: mod_base = OTHER; note = 2'-O-methyladenosine
  modified_base 16: mod_base = gm
  modified_base 17: mod_base = gm
  modified_base 18: mod_base = OTHER; note = 2'-O-methyladenosine
  modified_base 19: mod_base = OTHER; note = 2'-O-methylcytidine with a 3'-phosphorothioate linkage
  modified_base 20: mod_base = OTHER; note = 2'-O-methylcytidine with a 3'-phosphorothioate linkage
  modified_base 21: mod_base = OTHER; note = 2'-O-methyladenosine
cctggatggaactgaggacca

SEQ ID NO: 19 - RNA, 21 nt, synthetic construct
  source 1..21: mol_type = other RNA
  modified_base 1: mod_base = OTHER; note = 2'-O-methyluridine with a 3'-phosphorothioate linkage
  modified_base 2: mod_base = OTHER; note = 2'-O-methyluridine with a 3'-phosphorothioate linkage
  modified_base 3: mod_base = OTHER; note = 2'-O-methyladenosine
  modified_base 4: mod_base = OTHER; note = 2'-O-methyladenosine
  modified_base 5: mod_base = OTHER; note = 2'-O-methyladenosine
  modified_base 6: mod_base = gm
  modified_base 7: mod_base = cm
  modified_base 8: mod_base = OTHER; note = 2'-O-methyladenosine
  modified_base 9: mod_base = OTHER; note = 2'-fluoroguanosine
  modified_base 10: mod_base = OTHER; note = 2'-fluoroadenosine
  modified_base 11: mod_base = OTHER; note = 2'-fluoroguanosine
  modified_base 12: mod_base = um
  modified_base 13: mod_base = cm
  modified_base 14: mod_base = gm
  modified_base 15: mod_base = um
  modified_base 16: mod_base = gm
  modified_base 17: mod_base = gm
  modified_base 18: mod_base = cm
  modified_base 19: mod_base = OTHER; note = 2'-O-methyladenosine with a 3'-phosphorothioate linkage
  modified_base 20: mod_base = OTHER; note = 2'-O-methyluridine with a 3'-phosphorothioate linkage
  modified_base 21: mod_base = OTHER; note = 2'-O-methyladenosine
ttaaagcagagtcgtggcata

SEQ ID NO: 20 - RNA, 21 nt, synthetic construct
  source 1..21: mol_type = other RNA
  modified_base 1: mod_base = OTHER; note = 2'-O-methyluridine with a 3'-phosphorothioate linkage
  modified_base 2: mod_base = OTHER; note = 2'-O-methylguanosine with a 3'-phosphorothioate linkage
  modified_base 3: mod_base = cm
  modified_base 4: mod_base = gm
  modified_base 5: mod_base = OTHER; note = 2'-O-methyladenosine
  modified_base 6: mod_base = cm
  modified_base 7: mod_base = OTHER; note = 2'-O-methyladenosine
  modified_base 8: mod_base = gm
  modified_base 9: mod_base = OTHER; note = 2'-fluoroadenosine
  modified_base 10: mod_base = OTHER; note = 2'-fluorouridine
  modified_base 11: mod_base = OTHER; note = 2'-fluorocytidine
  modified_base 12: mod_base = cm
  modified_base 13: mod_base = OTHER; note = 2'-O-methyladenosine
  modified_base 14: mod_base = gm
  modified_base 15: mod_base = gm
  modified_base 16: mod_base = OTHER; note = 2'-O-methyladenosine
  modified_base 17: mod_base = gm
  modified_base 18: mod_base = OTHER; note = 2'-O-methyladenosine
  modified_base 19: mod_base = OTHER; note = 2'-O-methylguanosine with a 3'-phosphorothioate linkage
  modified_base 20: mod_base = OTHER; note = 2'-O-methyladenosine with a 3'-phosphorothioate linkage
  modified_base 21: mod_base = OTHER; note = 2'-O-methyladenosine
tgcgacagatccaggagagaa

SEQ ID NO: 21 - RNA, 21 nt, synthetic construct
  source 1..21: mol_type = other RNA
  modified_base 1: mod_base = OTHER; note = 2'-O-methyluridine with a 3'-phosphorothioate linkage
  modified_base 2: mod_base = OTHER; note = 2'-O-methylguanosine with a 3'-phosphorothioate linkage
  modified_base 3: mod_base = OTHER; note = 2'-O-methyladenosine
  modified_base 4: mod_base = OTHER; note = 2'-O-methyladenosine
  modified_base 5: mod_base = um
  modified_base 6: mod_base = cm
  modified_base 7: mod_base = um
  modified_base 8: mod_base = gm
  modified_base 9: mod_base = OTHER; note = 2'-fluorocytidine
  modified_base 10: mod_base = OTHER; note = 2'-fluorocytidine
  modified_base 11: mod_base = OTHER; note = 2'-fluorouridine
  modified_base 12: mod_base = gm
  modified_base 13: mod_base = gm
  modified_base 14: mod_base = OTHER; note = 2'-O-methyladenosine
  modified_base 15: mod_base = um
  modified_base 16: mod_base = gm
  modified_base 17: mod_base = gm
  modified_base 18: mod_base = OTHER; note = 2'-O-methyladenosine
  modified_base 19: mod_base = OTHER; note = 2'-O-methyladenosine with a 3'-phosphorothioate linkage
  modified_base 20: mod_base = OTHER; note = 2'-O-methylcytidine with a 3'-phosphorothioate linkage
  modified_base 21: mod_base = OTHER; note = 2'-O-methyladenosine
tgaatctgcctggatggaaca

SEQ ID NO: 22 - RNA, 21 nt, synthetic construct
  source 1..21: mol_type = other RNA
  modified_base 1: mod_base = OTHER; note = 2'-O-methylguanosine with a 3'-phosphorothioate linkage
  modified_base 2: mod_base = OTHER; note = 2'-O-methyladenosine with a 3'-phosphorothioate linkage
  modified_base 3: mod_base = gm
  modified_base 4: mod_base = cm
  modified_base 5: mod_base = um
  modified_base 6: mod_base = gm
  modified_base 7: mod_base = cm
  modified_base 8: mod_base = cm
  modified_base 9: mod_base = OTHER; note = 2'-fluorouridine
  modified_base 10: mod_base = OTHER; note = 2'-fluoroguanosine
  modified_base 11: mod_base = OTHER; note = 2'-fluorouridine
  modified_base 12: mod_base = um
  modified_base 13: mod_base = cm
  modified_base 14: mod_base = OTHER; note = 2'-O-methyladenosine
  modified_base 15: mod_base = cm
  modified_base 16: mod_base = um
  modified_base 17: mod_base = gm
  modified_base 18: mod_base = gm
  modified_base 19: mod_base = OTHER; note = 2'-O-methylguanosine with a 3'-phosphorothioate linkage
  modified_base 20: mod_base = OTHER; note = 2'-O-methyladenosine with a 3'-phosphorothioate linkage
  modified_base 21: mod_base = OTHER; note = 2'-O-methyladenosine
gagctgcctgttcactgggaa

SEQ ID NO: 23 - RNA, 21 nt, synthetic construct
  source 1..21: mol_type = other RNA
  modified_base 1: mod_base = OTHER; note = 2'-O-methyladenosine with a 3'-phosphorothioate linkage
  modified_base 2: mod_base = OTHER; note = 2'-O-methylguanosine with a 3'-phosphorothioate linkage
  modified_base 3: mod_base = gm
  modified_base 4: mod_base = um
  modified_base 5: mod_base = cm
  modified_base 6: mod_base = um
  modified_base 7: mod_base = um
  modified_base 8: mod_base = OTHER; note = 2'-O-methyladenosine
  modified_base 9: mod_base = OTHER; note = 2'-fluoroadenosine
  modified_base 10: mod_base = OTHER; note = 2'-fluoroadenosine
  modified_base 11: mod_base = OTHER; note = 2'-fluoroguanosine
  modified_base 12: mod_base = gm
  modified_base 13: mod_base = cm
  modified_base 14: mod_base = um
  modified_base 15: mod_base = cm
  modified_base 16: mod_base = OTHER; note = 2'-O-methyladenosine
  modified_base 17: mod_base = cm
  modified_base 18: mod_base = gm
  modified_base 19: mod_base = OTHER; note = 2'-O-methylcytidine with a 3'-phosphorothioate linkage
  modified_base 20: mod_base = OTHER; note = 2'-O-methyluridine with a 3'-phosphorothioate linkage
  modified_base 21: mod_base = OTHER; note = 2'-O-methyladenosine
aggtcttaaaggctcacgcta

SEQ ID NO: 24 - RNA, 21 nt, synthetic construct
  source 1..21: mol_type = other RNA
  modified_base 1: mod_base = OTHER; note = 2'-O-methyluridine with a 3'-phosphorothioate linkage
  modified_base 2: mod_base = OTHER; note = 2'-O-methylcytidine with a 3'-phosphorothioate linkage
  modified_base 3: mod_base = OTHER; note = 2'-O-methyladenosine
  modified_base 4: mod_base = cm
  modified_base 5: mod_base = um
  modified_base 6: mod_base = gm
  modified_base 7: mod_base = gm
  modified_base 8: mod_base = gm
  modified_base 9: mod_base = OTHER; note = 2'-fluoroadenosine
  modified_base 10: mod_base = OTHER; note = 2'-fluorouridine
  modified_base 11: mod_base = OTHER; note = 2'-fluorocytidine
  modified_base 12: mod_base = OTHER; note = 2'-O-methyladenosine
  modified_base 13: mod_base = gm
  modified_base 14: mod_base = cm
  modified_base 15: mod_base = cm
  modified_base 16: mod_base = OTHER; note = 2'-O-methyladenosine
  modified_base 17: mod_base = gm
  modified_base 18: mod_base = gm
  modified_base 19: mod_base = OTHER; note = 2'-O-methylguanosine with a 3'-phosphorothioate linkage
  modified_base 20: mod_base = OTHER; note = 2'-O-methylcytidine with a 3'-phosphorothioate linkage
  modified_base 21: mod_base = OTHER; note = 2'-O-methyladenosine
tcactgggatcagccagggca

SEQ ID NO: 25 - RNA, 21 nt, synthetic construct
  source 1..21: mol_type = other RNA
  modified_base 1: mod_base = OTHER; note = 2'-O-methyluridine with a 3'-phosphorothioate linkage
  modified_base 2: mod_base = OTHER; note = 2'-O-methylcytidine with a 3'-phosphorothioate linkage
  modified_base 3: mod_base = OTHER; note = 2'-O-methyladenosine
  modified_base 4: mod_base = um
  modified_base 5: mod_base = um
  modified_base 6: mod_base = OTHER; note = 2'-O-methyladenosine
  modified_base 7: mod_base = OTHER; note = 2'-O-methyladenosine
  modified_base 8: mod_base = OTHER; note = 2'-O-methyladenosine
  modified_base 9: mod_base = OTHER; note = 2'-fluoroguanosine
  modified_base 10: mod_base = OTHER; note = 2'-fluorocytidine
  modified_base 11: mod_base = OTHER; note = 2'-fluoroadenosine
  modified_base 12: mod_base = gm
  modified_base 13: mod_base = OTHER; note = 2'-O-methyladenosine
  modified_base 14: mod_base = gm
  modified_base 15: mod_base = um
  modified_base 16: mod_base = cm
  modified_base 17: mod_base = gm
  modified_base 18: mod_base = um
  modified_base 19: mod_base = OTHER; note = 2'-O-methylguanosine with a 3'-phosphorothioate linkage
  modified_base 20: mod_base = OTHER; note = 2'-O-methylguanosine with a 3'-phosphorothioate linkage
  modified_base 21: mod_base = OTHER; note = 2'-O-methyladenosine
tcattaaagcagagtcgtgga

SEQ ID NO: 26 - RNA, 21 nt, synthetic construct
  source 1..21: mol_type = other RNA
  modified_base 1: mod_base = OTHER; note = 2'-O-methylguanosine with a 3'-phosphorothioate linkage
  modified_base 2: mod_base = OTHER; note = 2'-O-methyladenosine with a 3'-phosphorothioate linkage
  modified_base 3: mod_base = OTHER; note = 2'-O-methyladenosine
  modified_base 4: mod_base = cm
  modified_base 5: mod_base = OTHER; note = 2'-O-methyladenosine
  modified_base 6: mod_base = gm
  modified_base 7: mod_base = cm
  modified_base 8: mod_base = cm
  modified_base 9: mod_base = OTHER; note = 2'-fluorouridine
  modified_base 10: mod_base = OTHER; note = 2'-fluoroguanosine
  modified_base 11: mod_base = OTHER; note = 2'-fluoroguanosine
  modified_base 12: mod_base = gm
  modified_base 13: mod_base = um
  modified_base 14: mod_base = cm
  modified_base 15: mod_base = um
  modified_base 16: mod_base = cm
  modified_base 17: mod_base = um
  modified_base 18: mod_base = OTHER; note = 2'-O-methyladenosine
  modified_base 19: mod_base = OTHER; note = 2'-O-methyluridine with a 3'-phosphorothioate linkage
  modified_base 20: mod_base = OTHER; note = 2'-O-methylguanosine with a 3'-phosphorothioate linkage
  modified_base 21: mod_base = OTHER; note = 2'-O-methyladenosine
gaacagcctgggtctctatga

SEQ ID NO: 27 - RNA, 21 nt, synthetic construct
  source 1..21: mol_type = other RNA
  modified_base 1: mod_base = OTHER; note = 2'-O-methylguanosine with a 3'-phosphorothioate linkage
  modified_base 2: mod_base = OTHER; note = 2'-O-methylguanosine with a 3'-phosphorothioate linkage
  modified_base 3: mod_base = gm
  modified_base 4: mod_base = gm
  modified_base 5: mod_base = cm
  modified_base 6: mod_base = OTHER; note = 2'-O-methyladenosine
  modified_base 7: mod_base = gm
  modified_base 8: mod_base = gm
  modified_base 9: mod_base = OTHER; note = 2'-fluoroadenosine
  modified_base 10: mod_base = OTHER; note = 2'-fluoroguanosine
  modified_base 11: mod_base = OTHER; note = 2'-fluoroguanosine
  modified_base 12: mod_base = um
  modified_base 13: mod_base = cm
  modified_base 14: mod_base = OTHER; note = 2'-O-methyladenosine
  modified_base 15: mod_base = gm
  modified_base 16: mod_base = cm
  modified_base 17: mod_base = cm
  modified_base 18: mod_base = gm
  modified_base 19: mod_base = OTHER; note = 2'-O-methylguanosine with a 3'-phosphorothioate linkage
  modified_base 20: mod_base = OTHER; note = 2'-O-methylguanosine with a 3'-phosphorothioate linkage
  modified_base 21: mod_base = OTHER; note = 2'-O-methyladenosine
ggggcaggaggtcagccggga

SEQ ID NO: 28 - RNA, 21 nt, synthetic construct
  source 1..21: mol_type = other RNA
  modified_base 1: mod_base = OTHER; note = 2'-O-methyladenosine with a 3'-phosphorothioate linkage
  modified_base 2: mod_base = OTHER; note = 2'-O-methylguanosine with a 3'-phosphorothioate linkage
  modified_base 3: mod_base = cm
  modified_base 4: mod_base = gm
  modified_base 5: mod_base = gm
  modified_base 6: mod_base = cm
  modified_base 7: mod_base = um
  modified_base 8: mod_base = OTHER; note = 2'-O-methyladenosine
  modified_base 9: mod_base = OTHER; note = 2'-fluoroguanosine
  modified_base 10: mod_base = OTHER; note = 2'-fluoroadenosine
  modified_base 11: mod_base = OTHER; note = 2'-fluoroadenosine
  modified_base 12: mod_base = gm
  modified_base 13: mod_base = um
  modified_base 14: mod_base = cm
  modified_base 15: mod_base = cm
  modified_base 16: mod_base = OTHER; note = 2'-O-methyladenosine
  modified_base 17: mod_base = gm
  modified_base 18: mod_base = cm
  modified_base 19: mod_base = OTHER; note = 2'-O-methyluridine with a 3'-phosphorothioate linkage
  modified_base 20: mod_base = OTHER; note = 2'-O-methylguanosine with a 3'-phosphorothioate linkage
  modified_base 21: mod_base = OTHER; note = 2'-O-methyladenosine
agcggctagaagtccagctga

SEQ ID NO: 29 - RNA, 21 nt, synthetic construct
  source 1..21: mol_type = other RNA
  modified_base 1: mod_base = OTHER; note = 2'-O-methylguanosine with a 3'-phosphorothioate linkage
  modified_base 2: mod_base = OTHER; note = 2'-O-methyladenosine with a 3'-phosphorothioate linkage
  modified_base 3: mod_base = gm
  modified_base 4: mod_base = OTHER; note = 2'-O-methyladenosine
  modified_base 5: mod_base = um
  modified_base 6: mod_base = gm
  modified_base 7: mod_base = gm
  modified_base 8: mod_base = um
  modified_base 9: mod_base = OTHER; note = 2'-fluoroguanosine
  modified_base 10: mod_base = OTHER; note = 2'-fluoroguanosine
  modified_base 11: mod_base = OTHER; note = 2'-fluorocytidine
  modified_base 12: mod_base = OTHER; note = 2'-O-methyladenosine
  modified_base 13: mod_base = cm
  modified_base 14: mod_base = OTHER; note = 2'-O-methyladenosine
  modified_base 15: mod_base = gm
  modified_base 16: mod_base = cm
  modified_base 17: mod_base = OTHER; note = 2'-O-methyladenosine
  modified_base 18: mod_base = gm
  modified_base 19: mod_base = OTHER; note = 2'-O-methylcytidine with a 3'-phosphorothioate linkage
  modified_base 20: mod_base = OTHER; note = 2'-O-methyladenosine with a 3'-phosphorothioate linkage
  modified_base 21: mod_base = OTHER; note = 2'-O-methyladenosine
gagatggtggcacagcagcaa

SEQ ID NO: 30 - RNA, 21 nt, synthetic construct
  source 1..21: mol_type = other RNA
  modified_base 1: mod_base = OTHER; note = 2'-O-methylguanosine with a 3'-phosphorothioate linkage
  modified_base 2: mod_base = OTHER; note = 2'-O-methylguanosine with a 3'-phosphorothioate linkage
  modified_base 3: mod_base = cm
  modified_base 4: mod_base = um
  modified_base 5: mod_base = gm
  modified_base 6: mod_base = OTHER; note = 2'-O-methyladenosine
  modified_base 7: mod_base = cm
  modified_base 8: mod_base = OTHER; note = 2'-O-methyladenosine
  modified_base 9: mod_base = OTHER; note = 2'-fluoroadenosine
  modified_base 10: mod_base = OTHER; note = 2'-fluoroadenosine
  modified_base 11: mod_base = OTHER; note = 2'-fluoroguanosine
  modified_base 12: mod_base = gm
  modified_base 13: mod_base = cm
  modified_base 14: mod_base = cm
  modified_base 15: mod_base = OTHER; note = 2'-O-methyladenosine
  modified_base 16: mod_base = gm
  modified_base 17: mod_base = gm
  modified_base 18: mod_base = OTHER; note = 2'-O-methyladenosine
  modified_base 19: mod_base = OTHER; note = 2'-O-methyladenosine with a 3'-phosphorothioate linkage
  modified_base 20: mod_base = OTHER; note = 2'-O-methylcytidine with a 3'-phosphorothioate linkage
  modified_base 21: mod_base = OTHER; note = 2'-O-methyladenosine
ggctgacaaaggccaggaaca

SEQ ID NO: 31 - RNA, 21 nt, synthetic construct
  source 1..21: mol_type = other RNA
  modified_base 1: mod_base = OTHER; note = 2'-O-methylguanosine with a 3'-phosphorothioate linkage
  modified_base 2: mod_base = OTHER; note = 2'-O-methyluridine with a 3'-phosphorothioate linkage
  modified_base 3: mod_base = cm
  modified_base 4: mod_base = cm
  modified_base 5: mod_base = OTHER; note = 2'-O-methyladenosine
  modified_base 6: mod_base = gm
  modified_base 7: mod_base = cm
  modified_base 8: mod_base = um
  modified_base 9: mod_base = OTHER; note = 2'-fluoroguanosine
  modified_base 10: mod_base = OTHER; note = 2'-fluoroadenosine
  modified_base 11: mod_base = OTHER; note = 2'-fluoroguanosine
  modified_base 12: mod_base = gm
  modified_base 13: mod_base = OTHER; note = 2'-O-methyladenosine
  modified_base 14: mod_base = gm
  modified_base 15: mod_base = cm
  modified_base 16: mod_base = gm
  modified_base 17: mod_base = cm
  modified_base 18: mod_base = cm
  modified_base 19: mod_base = OTHER; note = 2'-O-methyluridine with a 3'-phosphorothioate linkage
  modified_base 20: mod_base = OTHER; note = 2'-O-methylguanosine with a 3'-phosphorothioate linkage
  modified_base 21: mod_base = OTHER; note = 2'-O-methyladenosine
gtccagctgaggagcgcctga

SEQ ID NO: 32 - RNA, 21 nt, synthetic construct
  source 1..21: mol_type = other RNA
  modified_base 1: mod_base = OTHER; note = 2'-O-methylcytidine with a 3'-phosphorothioate linkage
  modified_base 2: mod_base = OTHER; note = 2'-O-methyladenosine with a 3'-phosphorothioate linkage
  modified_base 3: mod_base = um
  modified_base 4: mod_base = um
  modified_base 5: mod_base = OTHER; note = 2'-O-methyladenosine
  modified_base 6: mod_base = OTHER; note = 2'-O-methyladenosine
  modified_base 7: mod_base = OTHER; note = 2'-O-methyladenosine
  modified_base 8: mod_base = gm
  modified_base 9: mod_base = OTHER; note = 2'-fluorocytidine
  modified_base 10: mod_base = OTHER; note = 2'-fluoroadenosine
  modified_base 11: mod_base = OTHER; note = 2'-fluoroguanosine
  modified_base 12: mod_base = OTHER; note = 2'-O-methyladenosine
  modified_base 13: mod_base = gm
  modified_base 14: mod_base = um
  modified_base 15: mod_base = cm
  modified_base 16: mod_base = gm
  modified_base 17: mod_base = um
  modified_base 18: mod_base = gm
  modified_base 19: mod_base = OTHER; note = 2'-O-methylguanosine with a 3'-phosphorothioate linkage
  modified_base 20: mod_base = OTHER; note = 2'-O-methylcytidine with a 3'-phosphorothioate linkage
  modified_base 21: mod_base = OTHER; note = 2'-O-methyladenosine
cattaaagcagagtcgtggca

SEQ ID NO: 33 - RNA, 21 nt, synthetic construct
  source 1..21: mol_type = other RNA
  modified_base 1: mod_base = OTHER; note = 2'-O-methyluridine with a 3'-phosphorothioate linkage
  modified_base 2: mod_base = OTHER; note = 2'-O-methylcytidine with a 3'-phosphorothioate linkage
  modified_base 3: mod_base = cm
  modified_base 4: mod_base = cm
  modified_base 5: mod_base = OTHER; note = 2'-O-methyladenosine
  modified_base 6: mod_base = gm
  modified_base 7: mod_base = cm
  modified_base 8: mod_base = cm
  modified_base 9: mod_base = OTHER; note = 2'-fluorouridine
  modified_base 10: mod_base = OTHER; note = 2'-fluoroguanosine
  modified_base 11: mod_base = OTHER; note = 2'-fluoroadenosine
  modified_base 12: mod_base = OTHER; note = 2'-O-methyladenosine
  modified_base 13: mod_base = um
  modified_base 14: mod_base = cm
  modified_base 15: mod_base = um
  modified_base 16: mod_base = gm
  modified_base 17: mod_base = cm
  modified_base 18: mod_base = cm
  modified_base 19: mod_base = OTHER; note = 2'-O-methyluridine with a 3'-phosphorothioate linkage
  modified_base 20: mod_base = OTHER; note = 2'-O-methylguanosine with a 3'-phosphorothioate linkage
  modified_base 21: mod_base = OTHER; note = 2'-O-methyladenosine
tcccagcctgaatctgcctga

SEQ ID NO: 34 - RNA, 21 nt, synthetic construct
  source 1..21: mol_type = other RNA
  modified_base 1: mod_base = OTHER; note = 2'-O-methylguanosine with a 3'-phosphorothioate linkage
  modified_base 2: mod_base = OTHER; note = 2'-O-methylguanosine with a 3'-phosphorothioate linkage
  modified_base 3: mod_base = OTHER; note = 2'-O-methyladenosine
  modified_base 4: mod_base = um
  modified_base 5: mod_base = gm
  modified_base 6: mod_base = cm
  modified_base 7: mod_base = OTHER; note = 2'-O-methyladenosine
  modified_base 8: mod_base = gm
  modified_base 9: mod_base = OTHER; note = 2'-fluorocytidine
  modified_base 10: mod_base = OTHER; note = 2'-fluorocytidine
  modified_base 11: mod_base = OTHER; note = 2'-fluorocytidine
  modified_base 12: mod_base = OTHER; note = 2'-O-methyladenosine
  modified_base 13: mod_base = gm
  modified_base 14: mod_base = gm
  modified_base 15: mod_base = OTHER; note = 2'-O-methyladenosine
  modified_base 16: mod_base = OTHER; note = 2'-O-methyladenosine
  modified_base 17: mod_base = cm
  modified_base 18: mod_base = um
  modified_base 19: mod_base = OTHER; note = 2'-O-methyluridine with a 3'-phosphorothioate linkage
  modified_base 20: mod_base = OTHER; note = 2'-O-methylcytidine with a 3'-phosphorothioate linkage
  modified_base 21: mod_base = OTHER; note = 2'-O-methyladenosine
ggatgcagcccaggaacttca

SEQ ID NO: 35 - RNA, 21 nt, synthetic construct
  source 1..21: mol_type = other RNA
  modified_base 1: mod_base = OTHER; note = 2'-O-methylguanosine with a 3'-phosphorothioate linkage
  modified_base 2: mod_base = OTHER; note = 2'-O-methylcytidine with a 3'-phosphorothioate linkage
  modified_base 3: mod_base = um
  modified_base 4: mod_base = OTHER; note = 2'-O-methyladenosine
  modified_base 5: mod_base = gm
  modified_base 6: mod_base = OTHER; note = 2'-O-methyladenosine
  modified_base 7: mod_base = OTHER; note = 2'-O-methyladenosine
  modified_base 8: mod_base = gm
  modified_base 9: mod_base = OTHER; note = 2'-fluorouridine
  modified_base 10: mod_base = OTHER; note = 2'-fluorocytidine
  modified_base 11: mod_base = OTHER; note = 2'-fluorocytidine
  modified_base 12: mod_base = OTHER; note = 2'-O-methyladenosine
  modified_base 13: mod_base = gm
  modified_base 14: mod_base = cm
  modified_base 15: mod_base = um
  modified_base 16: mod_base = gm
  modified_base 17: mod_base = OTHER; note = 2'-O-methyladenosine
  modified_base 18: mod_base = gm
  modified_base 19: mod_base = OTHER; note = 2'-O-methylguanosine with a 3'-phosphorothioate linkage
  modified_base 20: mod_base = OTHER; note = 2'-O-methyladenosine with a 3'-phosphorothioate linkage
  modified_base 21: mod_base = OTHER; note = 2'-O-methyladenosine
gctagaagtccagctgaggaa

SEQ ID NO: 36 - RNA, 21 nt, synthetic construct
  source 1..21: mol_type = other RNA
  modified_base 1: mod_base = OTHER; note = 2'-O-methylcytidine with a 3'-phosphorothioate linkage
  modified_base 2: mod_base = OTHER; note = 2'-O-methyladenosine with a 3'-phosphorothioate linkage
  modified_base 3: mod_base = cm
  modified_base 4: mod_base = OTHER; note = 2'-O-methyladenosine
  modified_base 5: mod_base = gm
  modified_base 6: mod_base = cm
  modified_base 7: mod_base = OTHER; note = 2'-O-methyladenosine
  modified_base 8: mod_base = gm
  modified_base 9: mod_base = OTHER; note = 2'-fluorocytidine
  modified_base 10: mod_base = OTHER; note = 2'-fluoroadenosine
  modified_base 11: mod_base = OTHER; note = 2'-fluorouridine
  modified_base 12: mod_base = cm
  modified_base 13: mod_base = gm
  modified_base 14: mod_base = gm
  modified_base 15: mod_base = cm
  modified_base 16: mod_base = um
  modified_base 17: mod_base = gm
  modified_base 18: mod_base = cm
  modified_base 19: mod_base = OTHER; note = 2'-O-methylguanosine with a 3'-phosphorothioate linkage
  modified_base 20: mod_base = OTHER; note = 2'-O-methyladenosine with a 3'-phosphorothioate linkage
  modified_base 21: mod_base = OTHER; note = 2'-O-methyladenosine
cacagcagcatcggctgcgaa

SEQ ID NO: 37 - RNA, 21 nt, synthetic construct
  source 1..21: mol_type = other RNA
  modified_base 1: mod_base = OTHER; note = 2'-O-methylguanosine with a 3'-phosphorothioate linkage
  modified_base 2: mod_base = OTHER; note = 2'-O-methylguanosine with a 3'-phosphorothioate linkage
  modified_base 3: mod_base = OTHER; note = 2'-O-methyladenosine
  modified_base 4: mod_base = OTHER; note = 2'-O-methyladenosine
  modified_base 5: mod_base = cm
  modified_base 6: mod_base = um
  modified_base 7: mod_base = um
  modified_base 8: mod_base = cm
  modified_base 9: mod_base = OTHER; note = 2'-fluoroguanosine
  modified_base 10: mod_base = OTHER; note = 2'-fluoroguanosine
  modified_base 11: mod_base = OTHER; note = 2'-fluoroguanosine
  modified_base 12: mod_base = cm
  modified_base 13: mod_base = OTHER; note = 2'-O-methyladenosine
  modified_base 14: mod_base = OTHER; note = 2'-O-methyladenosine
  modified_base 15: mod_base = gm
  modified_base 16: mod_base = cm
  modified_base 17: mod_base = cm
  modified_base 18: mod_base = um
  modified_base 19: mod_base = OTHER; note = 2'-O-methylguanosine with a 3'-phosphorothioate linkage
  modified_base 20: mod_base = OTHER; note = 2'-O-methyluridine with a 3'-phosphorothioate linkage
  modified_base 21: mod_base = OTHER; note = 2'-O-methyladenosine
ggaacttcgggcaagcctgta

SEQ ID NO: 38 - RNA, 21 nt, synthetic construct
  source 1..21: mol_type = other RNA
  modified_base 1: mod_base = OTHER; note = 2'-O-methyladenosine with a 3'-phosphorothioate linkage
  modified_base 2: mod_base = OTHER; note = 2'-O-methylcytidine with a 3'-phosphorothioate linkage
  modified_base 3: mod_base = um
  modified_base 4: mod_base = gm
  modified_base 5: mod_base = gm
  modified_base 6: mod_base = gm
  modified_base 7: mod_base = OTHER; note = 2'-O-methyladenosine
  modified_base 8: mod_base = um
  modified_base 9: mod_base = OTHER; note = 2'-fluorocytidine
  modified_base 10: mod_base = OTHER; note = 2'-fluoroadenosine
  modified_base 11: mod_base = OTHER; note = 2'-fluoroguanosine
  modified_base 12: mod_base = cm
  modified_base 13: mod_base = cm
  modified_base 14: mod_base = OTHER; note = 2'-O-methyladenosine
  modified_base 15: mod_base = gm
  modified_base 16: mod_base = gm
  modified_base 17: mod_base = gm
  modified_base 18: mod_base = cm
  modified_base 19: mod_base = OTHER; note = 2'-O-methylguanosine with a 3'-phosphorothioate linkage
  modified_base 20: mod_base = OTHER; note = 2'-O-methylcytidine with a 3'-phosphorothioate linkage
  modified_base 21: mod_base = OTHER; note = 2'-O-methyladenosine
actgggatcagccagggcgca

SEQ ID NO: 39 - RNA, 21 nt, synthetic construct
  source 1..21: mol_type = other RNA
  modified_base 1: mod_base = OTHER; note = 2'-O-methyladenosine with a 3'-phosphorothioate linkage
  modified_base 2: mod_base = OTHER; note = 2'-O-methylguanosine with a 3'-phosphorothioate linkage
  modified_base 3: mod_base = OTHER; note = 2'-O-methyladenosine
  modified_base 4: mod_base = OTHER; note = 2'-O-methyladenosine
  modified_base 5: mod_base = gm
  modified_base 6: mod_base = um
  modified_base 7: mod_base = cm
  modified_base 8: mod_base = cm
  modified_base 9: mod_base = OTHER; note = 2'-fluoroadenosine
  modified_base 10: mod_base = OTHER; note = 2'-fluoroguanosine
  modified_base 11: mod_base = OTHER; note = 2'-fluorocytidine
  modified_base 12: mod_base = um
  modified_base 13: mod_base = gm
  modified_base 14: mod_base = OTHER; note = 2'-O-methyladenosine
  modified_base 15: mod_base = gm
  modified_base 16: mod_base = gm
  modified_base 17: mod_base = OTHER; note = 2'-O-methyladenosine
  modified_base 18: mod_base = gm
  modified_base 19: mod_base = OTHER; note = 2'-O-methylcytidine with a 3'-phosphorothioate linkage
  modified_base 20: mod_base = OTHER; note = 2'-O-methylguanosine with a 3'-phosphorothioate linkage
  modified_base 21: mod_base = OTHER; note = 2'-O-methyladenosine
agaagtccagctgaggagcga

SEQ ID NO: 40 - RNA, 21 nt, synthetic construct
  source 1..21: mol_type = other RNA
  modified_base 1: mod_base = OTHER; note = 2'-O-methylguanosine with a 3'-phosphorothioate linkage
  modified_base 2: mod_base = OTHER; note = 2'-O-methylcytidine with a 3'-phosphorothioate linkage
  modified_base 3: mod_base = OTHER; note = 2'-O-methyladenosine
  modified_base 4: mod_base = um
  modified_base 5: mod_base = cm
  modified_base 6: mod_base = gm
  modified_base 7: mod_base = gm
  modified_base 8: mod_base = cm
  modified_base 9: mod_base = OTHER; note = 2'-fluorouridine
  modified_base 10: mod_base = OTHER; note = 2'-fluoroguanosine
  modified_base 11: mod_base = OTHER; note = 2'-fluorocytidine
  modified_base 12: mod_base = gm
  modified_base 13: mod_base = OTHER; note = 2'-O-methyladenosine
  modified_base 14: mod_base = cm
  modified_base 15: mod_base = OTHER; note = 2'-O-methyladenosine
  modified_base 16: mod_base = gm
  modified_base 17: mod_base = OTHER; note = 2'-O-methyladenosine
  modified_base 18: mod_base = um
  modified_base 19: mod_base = OTHER; note = 2'-O-methylcytidine with a 3'-phosphorothioate linkage
  modified_base 20: mod_base = OTHER; note = 2'-O-methylcytidine with a 3'-phosphorothioate linkage
  modified_base 21: mod_base = OTHER; note = 2'-O-methyladenosine
gcatcggctgcgacagatcca

SEQ ID NO: 41 - RNA, 21 nt, synthetic construct
  source 1..21: mol_type = other RNA
  modified_base 1: mod_base = OTHER; note = 2'-O-methyladenosine with a 3'-phosphorothioate linkage
  modified_base 2: mod_base = OTHER; note = 2'-O-methylguanosine with a 3'-phosphorothioate linkage
  modified_base 3: mod_base = OTHER; note = 2'-O-methyladenosine
  modified_base 4: mod_base = um
  modified_base 5: mod_base = gm
  modified_base 6: mod_base = gm
  modified_base 7: mod_base = um
  modified_base 8: mod_base = gm
  modified_base 9: mod_base = OTHER; note = 2'-fluoroguanosine
  modified_base 10: mod_base = OTHER; note = 2'-fluorocytidine
  modified_base 11: mod_base = OTHER; note = 2'-fluoroadenosine
  modified_base 12: mod_base = cm
  modified_base 13: mod_base = OTHER; note = 2'-O-methyladenosine
  modified_base 14: mod_base = gm
  modified_base 15: mod_base = cm
  modified_base 16: mod_base = OTHER; note = 2'-O-methyladenosine
  modified_base 17: mod_base = gm
  modified_base 18: mod_base = cm
  modified_base 19: mod_base = OTHER; note = 2'-O-methyladenosine with a 3'-phosphorothioate linkage
  modified_base 20: mod_base = OTHER; note = 2'-O-methyluridine with a 3'-phosphorothioate linkage
  modified_base 21: mod_base = OTHER; note = 2'-O-methyladenosine
agatggtggcacagcagcata

SEQ ID NO: 42 - RNA, 21 nt, synthetic construct
  source 1..21: mol_type = other RNA
  modified_base 1: mod_base = OTHER; note = 2'-O-methylguanosine with a 3'-phosphorothioate linkage
  modified_base 2: mod_base = OTHER; note = 2'-O-methylguanosine with a 3'-phosphorothioate linkage
  modified_base 3: mod_base = um
  modified_base 4: mod_base = gm
  modified_base 5: mod_base = gm
  modified_base 6: mod_base = cm
  modified_base 7: mod_base = OTHER; note = 2'-O-methyladenosine
  modified_base 8: mod_base = cm
  modified_base 9: mod_base = OTHER; note = 2'-fluoroadenosine
  modified_base 10: mod_base = OTHER; note = 2'-fluoroguanosine
  modified_base 11: mod_base = OTHER; note = 2'-fluorocytidine
  modified_base 12: mod_base = OTHER; note = 2'-O-methyladenosine
  modified_base 13: mod_base = gm
  modified_base 14: mod_base = cm
  modified_base 15: mod_base = OTHER; note = 2'-O-methyladenosine
  modified_base 16: mod_base = um
  modified_base 17: mod_base = cm
  modified_base 18: mod_base = gm
  modified_base 19: mod_base = OTHER; note = 2'-O-methylguanosine with a 3'-phosphorothioate linkage
  modified_base 20: mod_base = OTHER; note = 2'-O-methylcytidine with a 3'-phosphorothioate linkage
  modified_base 21: mod_base = OTHER; note = 2'-O-methyladenosine
ggtggcacagcagcatcggca

SEQ ID NO: 43 - RNA, 21 nt, synthetic construct
  source 1..21: mol_type = other RNA
  modified_base 1: mod_base = OTHER; note = 2'-O-methyladenosine with a 3'-phosphorothioate linkage
  modified_base 2: mod_base = OTHER; note = 2'-O-methylcytidine with a 3'-phosphorothioate linkage
  modified_base 3: mod_base = OTHER; note = 2'-O-methyladenosine
  modified_base 4: mod_base = gm
  modified_base 5: mod_base = cm
  modified_base 6: mod_base = OTHER; note = 2'-O-methyladenosine
  modified_base 7: mod_base = gm
  modified_base 8: mod_base = cm
  modified_base 9: mod_base = OTHER; note = 2'-fluoroadenosine
  modified_base 10: mod_base = OTHER; note = 2'-fluorouridine
  modified_base 11: mod_base = OTHER; note = 2'-fluorocytidine
  modified_base 12: mod_base = gm
  modified_base 13: mod_base = gm
  modified_base 14: mod_base = cm
  modified_base 15: mod_base = um
  modified_base 16: mod_base = gm
  modified_base 17: mod_base = cm
  modified_base 18: mod_base = gm
  modified_base 19: mod_base = OTHER; note = 2'-O-methyladenosine with a 3'-phosphorothioate linkage
  modified_base 20: mod_base = OTHER; note = 2'-O-methylcytidine with a 3'-phosphorothioate linkage
  modified_base 21: mod_base = OTHER; note = 2'-O-methyladenosine
acagcagcatcggctgcgaca

SEQ ID NO: 44 - RNA, 21 nt, synthetic construct
  source 1..21: mol_type = other RNA
  modified_base 1: mod_base = OTHER; note = 2'-O-methyladenosine with a 3'-phosphorothioate linkage
  modified_base 2: mod_base = OTHER; note = 2'-O-methyladenosine with a 3'-phosphorothioate linkage
  modified_base 3: mod_base = gm
  modified_base 4: mod_base = gm
  modified_base 5: mod_base = cm
  modified_base 6: mod_base = um
  modified_base 7: mod_base = cm
  modified_base 8: mod_base = OTHER; note = 2'-O-methyladenosine
  modified_base 9: mod_base = OTHER; note = 2'-fluorocytidine
  modified_base 10: mod_base = OTHER; note = 2'-fluoroguanosine
  modified_base 11: mod_base = OTHER; note = 2'-fluorocytidine
  modified_base 12: mod_base = um
  modified_base 13: mod_base = gm
  modified_base 14: mod_base = OTHER; note = 2'-O-methyladenosine
  modified_base 15: mod_base = cm
  modified_base 16: mod_base = OTHER; note = 2'-O-methyladenosine
  modified_base 17: mod_base = OTHER; note = 2'-O-methyladenosine
  modified_base 18: mod_base = gm
  modified_base 19: mod_base = OTHER; note = 2'-O-methylcytidine with a 3'-phosphorothioate linkage
  modified_base 20: mod_base = OTHER; note = 2'-O-methyladenosine with a 3'-phosphorothioate linkage
  modified_base 21: mod_base = OTHER; note = 2'-O-methyladenosine
aaggctcacgctgacaagcaa

SEQ ID NO: 45 - RNA, 21 nt, synthetic construct
  source 1..21: mol_type = other RNA
  modified_base 1: mod_base = OTHER; note = 2'-O-methyladenosine with a 3'-phosphorothioate linkage
  modified_base 2: mod_base = OTHER; note = 2'-O-methylguanosine with a 3'-phosphorothioate linkage
  modified_base 3: mod_base = cm
  modified_base 4: mod_base = cm
  modified_base 5: mod_base = um
  modified_base 6: mod_base = gm
  modified_base 7: mod_base = OTHER; note = 2'-O-methyladenosine
  modified_base 8: mod_base = OTHER; note = 2'-O-methyladenosine
  modified_base 9: mod_base = OTHER; note = 2'-fluorouridine
  modified_base 10: mod_base = OTHER; note = 2'-fluorocytidine
  modified_base 11: mod_base = OTHER; note = 2'-fluorouridine
  modified_base 12: mod_base = gm
  modified_base 13: mod_base = cm
  modified_base 14: mod_base = cm
  modified_base 15: mod_base = um
  modified_base 16: mod_base = gm
  modified_base 17: mod_base = gm
  modified_base 18: mod_base = OTHER; note = 2'-O-methyladenosine
  modified_base 19: mod_base = OTHER; note = 2'-O-methyluridine with a 3'-phosphorothioate linkage
  modified_base 20: mod_base = OTHER; note = 2'-O-methylguanosine with a 3'-phosphorothioate linkage
  modified_base 21: mod_base = OTHER; note = 2'-O-methyladenosine
agcctgaatctgcctggatga

SEQ ID NO: 46 - RNA, 21 nt, synthetic construct
  source 1..21: mol_type = other RNA
  modified_base 1: mod_base = OTHER; note = 2'-O-methyladenosine with a 3'-phosphorothioate linkage
  modified_base 2: mod_base = OTHER; note = 2'-O-methyluridine with a 3'-phosphorothioate linkage
  modified_base 3: mod_base = cm
  modified_base 4: mod_base = gm
  modified_base 5: mod_base = gm
  modified_base 6: mod_base = cm
  modified_base 7: mod_base = um
  modified_base 8: mod_base = gm
  modified_base 9: mod_base = OTHER; note = 2'-fluorocytidine
  modified_base 10: mod_base = OTHER; note = 2'-fluoroguanosine
  modified_base 11: mod_base = OTHER; note = 2'-fluoroadenosine
  modified_base 12: mod_base = cm
  modified_base 13: mod_base = OTHER; note = 2'-O-methyladenosine
  modified_base 14: mod_base = gm
  modified_base 15: mod_base = OTHER; note = 2'-O-methyladenosine
  modified_base 16: mod_base = um
  modified_base 17: mod_base = cm
  modified_base 18: mod_base = cm
  modified_base 19: mod_base = OTHER; note = 2'-O-methyladenosine with a 3'-phosphorothioate linkage
  modified_base 20: mod_base = OTHER; note = 2'-O-methylguanosine with a 3'-phosphorothioate linkage
  modified_base 21: mod_base = OTHER; note = 2'-O-methyladenosine
atcggctgcgacagatccaga

SEQ ID NO: 47 - RNA, 21 nt, synthetic construct
  source 1..21: mol_type = other RNA
  modified_base 1: mod_base = OTHER; note = 2'-O-methyladenosine with a 3'-phosphorothioate linkage
  modified_base 2: mod_base = OTHER; note = 2'-O-methylguanosine with a 3'-phosphorothioate linkage
  modified_base 3: mod_base = um
  modified_base 4: mod_base = cm
  modified_base 5: mod_base = cm
  modified_base 6: mod_base = OTHER; note = 2'-O-methyladenosine
  modified_base 7: mod_base = gm
  modified_base 8: mod_base = cm
  modified_base 9: mod_base = OTHER; note = 2'-fluorouridine
  modified_base 10: mod_base = OTHER; note = 2'-fluoroguanosine
  modified_base 11: mod_base = OTHER; note = 2'-fluoroadenosine
  modified_base 12: mod_base = gm
  modified_base 13: mod_base = gm
  modified_base 14: mod_base = OTHER; note = 2'-O-methyladenosine
  modified_base 15: mod_base = gm
  modified_base 16: mod_base = cm
  modified_base 17: mod_base = gm
  modified_base 18: mod_base = cm
  modified_base 19: mod_base = OTHER; note = 2'-O-methylcytidine with a 3'-phosphorothioate linkage
  modified_base 20: mod_base = OTHER; note = 2'-O-methyluridine with a 3'-phosphorothioate linkage
  modified_base 21: mod_base = OTHER; note = 2'-O-methyladenosine
agtccagctgaggagcgccta

SEQ ID NO: 48 - RNA, 21 nt, synthetic construct
  source 1..21: mol_type = other RNA
  modified_base 1: mod_base = OTHER; note = 2'-O-methylcytidine with a 3'-phosphorothioate linkage
  modified_base 2: mod_base = OTHER; note = 2'-O-methylguanosine with a 3'-phosphorothioate linkage
  modified_base 3: mod_base = gm
  modified_base 4: mod_base = cm
  modified_base 5: mod_base = OTHER; note = 2'-O-methyladenosine
  modified_base 6: mod_base = gm
  modified_base 7: mod_base = OTHER; note = 2'-O-methyladenosine
  modified_base 8: mod_base = gm
  modified_base 9: mod_base = OTHER; note = 2'-fluoroguanosine
  modified_base 10: mod_base = OTHER; note = 2'-fluorocytidine
  modified_base 11: mod_base = OTHER; note = 2'-fluoroguanosine
  modified_base 12: mod_base = gm
  modified_base 13: mod_base = gm
  modified_base 14: mod_base = OTHER; note = 2'-O-methyladenosine
  modified_base 15: mod_base = gm
  modified_base 16: mod_base = OTHER; note = 2'-O-methyladenosine
  modified_base 17: mod_base = um
  modified_base 18: mod_base = gm
  modified_base 19: mod_base = OTHER; note = 2'-O-methylguanosine with a 3'-phosphorothioate linkage
  modified_base 20: mod_base = OTHER; note = 2'-O-methyluridine with a 3'-phosphorothioate linkage
  modified_base 21: mod_base = OTHER; note = 2'-O-methyladenosine
cggcagaggcgggagatggta

SEQ ID NO: 49 - RNA, 21 nt, synthetic construct
  source 1..21: mol_type = other RNA
  modified_base 1: mod_base = OTHER; note = 2'-O-methyladenosine with a 3'-phosphorothioate linkage
  modified_base 2: mod_base = OTHER; note = 2'-O-methyluridine with a 3'-phosphorothioate linkage
  modified_base 3: mod_base = gm
  modified_base 4: mod_base = cm
  modified_base 5: mod_base = um
  modified_base 6: mod_base = gm
  modified_base 7: mod_base = cm
  modified_base 8: mod_base = OTHER; note = 2'-O-methyladenosine
  modified_base 9: mod_base = OTHER; note = 2'-fluoroadenosine
  modified_base 10: mod_base = OTHER; note = 2'-fluoroguanosine
  modified_base 11: mod_base = OTHER; note = 2'-fluoroguanosine
  modified_base 12: mod_base = OTHER; note = 2'-O-methyladenosine
  modified_base 13: mod_base = OTHER; note = 2'-O-methyladenosine
  modified_base 14: mod_base = cm
  modified_base 15: mod_base = OTHER; note = 2'-O-methyladenosine
  modified_base 16: mod_base = cm
  modified_base 17: mod_base = um
  modified_base 18: mod_base = um
  modified_base 19: mod_base = OTHER; note = 2'-O-methylcytidine with a 3'-phosphorothioate linkage
  modified_base 20: mod_base = OTHER; note = 2'-O-methylcytidine with a 3'-phosphorothioate linkage
  modified_base 21: mod_base = OTHER; note = 2'-O-methyladenosine
atgctgcaaggaacacttcca

SEQ ID NO: 50 - RNA, 21 nt, synthetic construct
  source 1..21: mol_type = other RNA
  modified_base 1: mod_base = OTHER; note = 2'-O-methylcytidine with a 3'-phosphorothioate linkage
  modified_base 2: mod_base = OTHER; note = 2'-O-methyluridine with a 3'-phosphorothioate linkage
  modified_base 3: mod_base = um
  modified_base 4: mod_base = cm
  modified_base 5: mod_base = gm
  modified_base 6: mod_base = gm
  modified_base 7: mod_base = gm
  modified_base 8: mod_base = cm
  modified_base 9: mod_base = OTHER; note = 2'-fluoroadenosine
  modified_base 10: mod_base = OTHER; note = 2'-fluoroadenosine
  modified_base 11: mod_base = OTHER; note = 2'-fluoroguanosine
  modified_base 12: mod_base = cm
  modified_base 13: mod_base = cm
  modified_base 14: mod_base = um
  modified_base 15: mod_base = gm
  modified_base 16: mod_base = um
  modified_base 17: mod_base = um
  modified_base 18: mod_base = gm
  modified_base 19: mod_base = OTHER; note = 2'-O-methylguanosine with a 3'-phosphorothioate linkage
  modified_base 20: mod_base = OTHER; note = 2'-O-methyladenosine with a 3'-phosphorothioate linkage
  modified_base 21: mod_base = OTHER; note = 2'-O-methyladenosine
cttcgggcaagcctgttggaa

SEQ ID NO: 51 - RNA, 21 nt, synthetic construct
  source 1..21: mol_type = other RNA
  modified_base 1: mod_base = OTHER; note = 2'-O-methylguanosine with a 3'-phosphorothioate linkage
  modified_base 2: mod_base = OTHER; note = 2'-O-methylguanosine with a 3'-phosphorothioate linkage
  modified_base 3: mod_base = OTHER; note = 2'-O-methyladenosine
  modified_base 4: mod_base = gm
  modified_base 5: mod_base = cm
  modified_base 6: mod_base = um
  modified_base 7: mod_base = gm
  modified_base 8: mod_base = cm
  modified_base 9: mod_base = OTHER; note = 2'-fluorocytidine
  modified_base 10: mod_base = OTHER; note = 2'-fluorouridine
  modified_base 11: mod_base = OTHER; note = 2'-fluoroguanosine
  modified_base 12: mod_base = um
  modified_base 13: mod_base = um
  modified_base 14: mod_base = cm
  modified_base 15: mod_base = OTHER; note = 2'-O-methyladenosine
  modified_base 16: mod_base = cm
  modified_base 17: mod_base = um
  modified_base 18: mod_base = gm
  modified_base 19: mod_base = OTHER; note = 2'-O-methylguanosine with a 3'-phosphorothioate linkage
  modified_base 20: mod_base = OTHER; note = 2'-O-methylguanosine with a 3'-phosphorothioate linkage
  modified_base 21: mod_base = OTHER; note = 2'-O-methyladenosine
ggagctgcctgttcactggga

SEQ ID NO: 52 - RNA, 21 nt, synthetic construct
  source 1..21: mol_type = other RNA
  modified_base 1: mod_base = OTHER; note = 2'-O-methylguanosine with a 3'-phosphorothioate linkage
  modified_base 2: mod_base = OTHER; note = 2'-O-methylcytidine with a 3'-phosphorothioate linkage
  modified_base 3: mod_base = cm
  modified_base 4: mod_base = um
  modified_base 5: mod_base = gm
  modified_base 6: mod_base = gm
  modified_base 7: mod_base = OTHER; note = 2'-O-methyladenosine
  modified_base 8: mod_base = um
  modified_base 9: mod_base = OTHER; note = 2'-fluoroguanosine
  modified_base 10: mod_base = OTHER; note = 2'-fluoroguanosine
  modified_base 11: mod_base = OTHER; note = 2'-fluoroadenosine
  modified_base 12: mod_base = OTHER; note = 2'-O-methyladenosine
  modified_base 13: mod_base = cm
  modified_base 14: mod_base = um
  modified_base 15: mod_base = gm
  modified_base 16: mod_base = OTHER; note = 2'-O-methyladenosine
  modified_base 17: mod_base = gm
  modified_base 18: mod_base = gm
  modified_base 19: mod_base = OTHER; note = 2'-O-methyladenosine with a 3'-phosphorothioate linkage
  modified_base 20: mod_base = OTHER; note = 2'-O-methylcytidine with a 3'-phosphorothioate linkage
  modified_base 21: mod_base = OTHER; note = 2'-O-methyladenosine
gcctggatggaactgaggaca

SEQ ID NO: 53 - RNA, 21 nt, synthetic construct
  source 1..21: mol_type = other RNA
  modified_base 1: mod_base = OTHER; note = 2'-O-methylcytidine with a 3'-phosphorothioate linkage
  modified_base 2: mod_base = OTHER; note = 2'-O-methyladenosine with a 3'-phosphorothioate linkage
  modified_base 3: mod_base = OTHER; note = 2'-O-methyladenosine
  modified_base 4: mod_base = gm
  modified_base 5: mod_base = gm
  modified_base 6: mod_base = OTHER; note = 2'-O-methyladenosine
  modified_base 7: mod_base = OTHER; note = 2'-O-methyladenosine
  modified_base 8: mod_base = cm
  modified_base 9: mod_base = OTHER; note = 2'-fluoroadenosine
  modified_base 10: mod_base = OTHER; note = 2'-fluorocytidine
  modified_base 11: mod_base = OTHER; note = 2'-fluorouridine
  modified_base 12: mod_base = um
  modified_base 13: mod_base = cm
  modified_base 14: mod_base = cm
  modified_base 15: mod_base = OTHER; note = 2'-O-methyladenosine
  modified_base 16: mod_base = cm
  modified_base 17: mod_base = gm
  modified_base 18: mod_base = cm
  modified_base 19: mod_base = OTHER; note = 2'-O-methylcytidine with a 3'-phosphorothioate linkage
  modified_base 20: mod_base = OTHER; note = 2'-O-methylcytidine with a 3'-phosphorothioate linkage
  modified_base 21: mod_base = OTHER; note = 2'-O-methyladenosine
caaggaacacttccacgccca

SEQ ID NO: 54 - RNA, 21 nt, synthetic construct
  source 1..21: mol_type = other RNA
  modified_base 1: mod_base = OTHER; note = 2'-O-methylguanosine with a 3'-phosphorothioate linkage
  modified_base 2: mod_base = OTHER; note = 2'-O-methylguanosine with a 3'-phosphorothioate linkage
  modified_base 3: mod_base = cm
  modified_base 4: mod_base = um
  modified_base 5: mod_base = OTHER; note = 2'-O-methyladenosine
  modified_base 6: mod_base = gm
  modified_base 7: mod_base = OTHER; note = 2'-O-methyladenosine
  modified_base 8: mod_base = OTHER; note = 2'-O-methyladenosine
  modified_base 9: mod_base = OTHER; note = 2'-fluoroguanosine
  modified_base 10: mod_base = OTHER; note = 2'-fluorouridine
  modified_base 11: mod_base = OTHER; note = 2'-fluorocytidine
  modified_base 12: mod_base = cm
  modified_base 13: mod_base = OTHER; note = 2'-O-methyladenosine
  modified_base 14: mod_base = gm
  modified_base 15: mod_base = cm
  modified_base 16: mod_base = um
  modified_base 17: mod_base = gm
  modified_base 18: mod_base = OTHER; note = 2'-O-methyladenosine
  modified_base 19: mod_base = OTHER; note = 2'-O-methylguanosine with a 3'-phosphorothioate linkage
  modified_base 20: mod_base = OTHER; note = 2'-O-methylguanosine with a 3'-phosphorothioate linkage
  modified_base 21: mod_base = OTHER; note = 2'-O-methyladenosine
ggctagaagtccagctgagga

SEQ ID NO: 55 - RNA, 21 nt, synthetic construct
  source 1..21: mol_type = other RNA
  modified_base 1: mod_base = OTHER; note = 2'-O-methyluridine with a 3'-phosphorothioate linkage
  modified_base 2: mod_base = OTHER; note = 2'-O-methylguanosine with a 3'-phosphorothioate linkage
  modified_base 3: mod_base = OTHER; note = 2'-O-methyladenosine
  modified_base 4: mod_base = gm
  modified_base 5: mod_base = gm
  modified_base 6: mod_base = um
  modified_base 7: mod_base = cm
  modified_base 8: mod_base = um
  modified_base 9: mod_base = OTHER; note = 2'-fluorouridine
  modified_base 10: mod_base = OTHER; note = 2'-fluoroadenosine
  modified_base 11: mod_base = OTHER; note = 2'-fluoroadenosine
  modified_base 12: mod_base = OTHER; note = 2'-O-methyladenosine
  modified_base 13: mod_base = gm
  modified_base 14: mod_base = gm
  modified_base 15: mod_base = cm
  modified_base 16: mod_base = um
  modified_base 17: mod_base = cm
  modified_base 18: mod_base = OTHER; note = 2'-O-methyladenosine
  modified_base 19: mod_base = OTHER; note = 2'-O-methylcytidine with a 3'-phosphorothioate linkage
  modified_base 20: mod_base = OTHER; note = 2'-O-methylguanosine with a 3'-phosphorothioate linkage
  modified_base 21: mod_base = OTHER; note = 2'-O-methyladenosine
tgaggtcttaaaggctcacga

SEQ ID NO: 56 - RNA, 21 nt, synthetic construct
  source 1..21: mol_type = other RNA
  modified_base 1: mod_base = OTHER; note = 2'-O-methylguanosine with a 3'-phosphorothioate linkage
  modified_base 2: mod_base = OTHER; note = 2'-O-methylguanosine with a 3'-phosphorothioate linkage
  modified_base 3: mod_base = gm
  modified_base 4: mod_base = cm
  modified_base 5: mod_base = OTHER; note = 2'-O-methyladenosine
  modified_base 6: mod_base = OTHER; note = 2'-O-methyladenosine
  modified_base 7: mod_base = gm
  modified_base 8: mod_base = cm
  modified_base 9: mod_base = OTHER; note = 2'-fluorocytidine
  modified_base 10: mod_base = OTHER; note = 2'-fluorouridine
  modified_base 11: mod_base = OTHER; note = 2'-fluoroguanosine
  modified_base 12: mod_base = um
  modified_base 13: mod_base = um
  modified_base 14: mod_base = gm
  modified_base 15: mod_base = gm
  modified_base 16: mod_base = OTHER; note = 2'-O-methyladenosine
  modified_base 17: mod_base = gm
  modified_base 18: mod_base = OTHER; note = 2'-O-methyladenosine
  modified_base 19: mod_base = OTHER; note = 2'-O-methylcytidine with a 3'-phosphorothioate linkage
  modified_base 20: mod_base = OTHER; note = 2'-O-methyluridine with a 3'-phosphorothioate linkage
  modified_base 21: mod_base = OTHER; note = 2'-O-methyladenosine
gggcaagcctgttggagacta

SEQ ID NO: 57 - RNA, 21 nt, synthetic construct
  source 1..21: mol_type = other RNA
  modified_base 1: mod_base = OTHER; note = 2'-O-methylguanosine with a 3'-phosphorothioate linkage
  modified_base 2: mod_base = OTHER; note = 2'-O-methylcytidine with a 3'-phosphorothioate linkage
  modified_base 3: mod_base = gm
  modified_base 4: mod_base = gm
  modified_base 5: mod_base = cm
  modified_base 6: mod_base = um
  modified_base 7: mod_base = OTHER; note = 2'-O-methyladenosine
  modified_base 8: mod_base = gm
  modified_base 9: mod_base = OTHER; note = 2'-fluoroadenosine
  modified_base 10: mod_base = OTHER; note = 2'-fluoroadenosine
  modified_base 11: mod_base = OTHER; note = 2'-fluoroguanosine
  modified_base 12: mod_base = um
  modified_base 13: mod_base = cm
  modified_base 14: mod_base = cm
  modified_base 15: mod_base = OTHER; note = 2'-O-methyladenosine
  modified_base 16: mod_base = gm
  modified_base 17: mod_base = cm
  modified_base 18: mod_base = um
  modified_base 19: mod_base = OTHER; note = 2'-O-methylguanosine with a 3'-phosphorothioate linkage
  modified_base 20: mod_base = OTHER; note = 2'-O-methyladenosine with a 3'-phosphorothioate linkage
  modified_base 21: mod_base = OTHER; note = 2'-O-methyladenosine
gcggctagaagtccagctgaa

SEQ ID NO: 58 - RNA, 21 nt, synthetic construct
  source 1..21: mol_type = other RNA
  modified_base 1: mod_base = OTHER; note = 2'-O-methyluridine with a 3'-phosphorothioate linkage
  modified_base 2: mod_base = OTHER; note = 2'-O-methylguanosine with a 3'-phosphorothioate linkage
  modified_base 3: mod_base = gm
  modified_base 4: mod_base = cm
  modified_base 5: mod_base = OTHER; note = 2'-O-methyladenosine
  modified_base 6: mod_base = cm
  modified_base 7: mod_base = OTHER; note = 2'-O-methyladenosine
  modified_base 8: mod_base = gm
  modified_base 9: mod_base = OTHER; note = 2'-fluorocytidine
  modified_base 10: mod_base = OTHER; note = 2'-fluoroadenosine
  modified_base 11: mod_base = OTHER; note = 2'-fluoroguanosine
  modified_base 12: mod_base = cm
  modified_base 13: mod_base = OTHER; note = 2'-O-methyladenosine
  modified_base 14: mod_base = um
  modified_base 15: mod_base = cm
  modified_base 16: mod_base = gm
  modified_base 17: mod_base = gm
  modified_base 18: mod_base = cm
  modified_base 19: mod_base = OTHER; note = 2'-O-methyluridine with a 3'-phosphorothioate linkage
  modified_base 20: mod_base = OTHER; note = 2'-O-methylguanosine with a 3'-phosphorothioate linkage
  modified_base 21: mod_base = OTHER; note = 2'-O-methyladenosine
tggcacagcagcatcggctga

SEQ ID NO: 59 - RNA, 21 nt, synthetic construct
  source 1..21: mol_type = other RNA
  modified_base 1: mod_base = OTHER; note = 2'-O-methyladenosine with a 3'-phosphorothioate linkage
  modified_base 2: mod_base = OTHER; note = 2'-O-methyluridine with a 3'-phosphorothioate linkage
  modified_base 3: mod_base = gm
  modified_base 4: mod_base = gm
  modified_base 5: mod_base = um
  modified_base 6: mod_base = gm
  modified_base 7: mod_base = gm
  modified_base 8: mod_base = cm
  modified_base 9: mod_base = OTHER; note = 2'-fluoroadenosine
  modified_base 10: mod_base = OTHER; note = 2'-fluorocytidine
  modified_base 11: mod_base = OTHER; note = 2'-fluoroadenosine
  modified_base 12: mod_base = gm
  modified_base 13: mod_base = cm
  modified_base 14: mod_base = OTHER; note = 2'-O-methyladenosine
  modified_base 15: mod_base = gm
  modified_base 16: mod_base = cm
  modified_base 17: mod_base = OTHER; note = 2'-O-methyladenosine
  modified_base 18: mod_base = um
  modified_base 19: mod_base = OTHER; note = 2'-O-methylcytidine with a 3'-phosphorothioate linkage
  modified_base 20: mod_base = OTHER; note = 2'-O-methylguanosine with a 3'-phosphorothioate linkage
  modified_base 21: mod_base = OTHER; note = 2'-O-methyladenosine
atggtggcacagcagcatcga

SEQ ID NO: 60 - RNA, 21 nt, synthetic construct
  source 1..21: mol_type = other RNA
  modified_base 1: mod_base = OTHER; note = 2'-O-methyladenosine with a 3'-phosphorothioate linkage
  modified_base 2: mod_base = OTHER; note = 2'-O-methylguanosine with a 3'-phosphorothioate linkage
  modified_base 3: mod_base = OTHER; note = 2'-O-methyladenosine
  modified_base 4: mod_base = OTHER; note = 2'-O-methyladenosine
  modified_base 5: mod_base = um
  modified_base 6: mod_base = um
  modified_base 7: mod_base = um
  modified_base 8: mod_base = gm
  modified_base 9: mod_base = OTHER; note = 2'-fluoroadenosine
  modified_base 10: mod_base = OTHER; note = 2'-fluoroguanosine
  modified_base 11: mod_base = OTHER; note = 2'-fluoroguanosine
  modified_base 12: mod_base = um
  modified_base 13: mod_base = cm
  modified_base 14: mod_base = um
  modified_base 15: mod_base = um
  modified_base 16: mod_base = OTHER; note = 2'-O-methyladenosine
  modified_base 17: mod_base = OTHER; note = 2'-O-methyladenosine
  modified_base 18: mod_base = OTHER; note = 2'-O-methyladenosine
  modified_base 19: mod_base = OTHER; note = 2'-O-methylguanosine with a 3'-phosphorothioate linkage
  modified_base 20: mod_base = OTHER; note = 2'-O-methylguanosine with a 3'-phosphorothioate linkage
  modified_base 21: mod_base = OTHER; note = 2'-O-methyladenosine
agaatttgaggtcttaaagga

SEQ ID NO: 61 - RNA, 21 nt, synthetic construct
  source 1..21: mol_type = other RNA
  modified_base 1: mod_base = OTHER; note = 2'-O-methylguanosine with a 3'-phosphorothioate linkage
  modified_base 2: mod_base = OTHER; note = 2'-O-methylguanosine with a 3'-phosphorothioate linkage
  modified_base 3: mod_base = OTHER; note = 2'-O-methyladenosine
  modified_base 4: mod_base = OTHER; note = 2'-O-methyladenosine
  modified_base 5: mod_base = cm
  modified_base 6: mod_base = OTHER; note = 2'-O-methyladenosine
  modified_base 7: mod_base = gm
  modified_base 8: mod_base = cm
  modified_base 9: mod_base = OTHER; note = 2'-fluorocytidine
  modified_base 10: mod_base = OTHER; note = 2'-fluorouridine
  modified_base 11: mod_base = OTHER; note = 2'-fluoroguanosine
  modified_base 12: mod_base = gm
  modified_base 13: mod_base = gm
  modified_base 14: mod_base = um
  modified_base 15: mod_base = cm
  modified_base 16: mod_base = um
  modified_base 17: mod_base = cm
  modified_base 18: mod_base = um
  modified_base 19: mod_base = OTHER; note = 2'-O-methyladenosine with a 3'-phosphorothioate linkage
  modified_base 20: mod_base = OTHER; note = 2'-O-methyluridine with a 3'-phosphorothioate linkage
  modified_base 21: mod_base = OTHER; note = 2'-O-methyladenosine
ggaacagcctgggtctctata

SEQ ID NO: 62 - RNA, 21 nt, synthetic construct
  source 1..21: mol_type = other RNA
  modified_base 1: mod_base = OTHER; note = 2'-O-methyladenosine with a 3'-phosphorothioate linkage
  modified_base 2: mod_base = OTHER; note = 2'-O-methylguanosine with a 3'-phosphorothioate linkage
  modified_base 3: mod_base = gm
  modified_base 4: mod_base = cm
  modified_base 5: mod_base = um
  modified_base 6: mod_base = cm
  modified_base 7: mod_base = OTHER; note = 2'-O-methyladenosine
  modified_base 8: mod_base = cm
  modified_base 9: mod_base = OTHER; note = 2'-fluoroguanosine
  modified_base 10: mod_base = OTHER; note = 2'-fluorocytidine
  modified_base 11: mod_base = OTHER; note = 2'-fluorouridine
  modified_base 12: mod_base = gm
  modified_base 13: mod_base = OTHER; note = 2'-O-methyladenosine
  modified_base 14: mod_base = cm
  modified_base 15: mod_base = OTHER; note = 2'-O-methyladenosine
  modified_base 16: mod_base = OTHER; note = 2'-O-methyladenosine
  modified_base 17: mod_base = gm
  modified_base 18: mod_base = cm
  modified_base 19: mod_base = OTHER; note = 2'-O-methyladenosine with a 3'-phosphorothioate linkage
  modified_base 20: mod_base = OTHER; note = 2'-O-methylguanosine with a 3'-phosphorothioate linkage
  modified_base 21: mod_base = OTHER; note = 2'-O-methyladenosine
aggctcacgctgacaagcaga

SEQ ID NO: 63 - RNA, 21 nt, synthetic construct
  source 1..21: mol_type = other RNA
  modified_base 1: mod_base = OTHER; note = 2'-O-methylguanosine with a 3'-phosphorothioate linkage
  modified_base 2: mod_base = OTHER; note = 2'-O-methylguanosine with a 3'-phosphorothioate linkage
  modified_base 3: mod_base = cm
  modified_base 4: mod_base = OTHER; note = 2'-O-methyladenosine
  modified_base 5: mod_base = cm
  modified_base 6: mod_base = OTHER; note = 2'-O-methyladenosine
  modified_base 7: mod_base = gm
  modified_base 8: mod_base = cm
  modified_base 9: mod_base = OTHER; note = 2'-fluoroadenosine
  modified_base 10: mod_base = OTHER; note = 2'-fluoroguanosine
  modified_base 11: mod_base = OTHER; note = 2'-fluorocytidine
  modified_base 12: mod_base = OTHER; note = 2'-O-methyladenosine
  modified_base 13: mod_base = um
  modified_base 14: mod_base = cm
  modified_base 15: mod_base = gm
  modified_base 16: mod_base = gm
  modified_base 17: mod_base = cm
  modified_base 18: mod_base = um
  modified_base 19: mod_base = OTHER; note = 2'-O-methylguanosine with a 3'-phosphorothioate linkage
  modified_base 20: mod_base = OTHER; note = 2'-O-methylcytidine with a 3'-phosphorothioate linkage
  modified_base 21: mod_base = OTHER; note = 2'-O-methyladenosine
ggcacagcagcatcggctgca

SEQ ID NO: 64 - RNA, 21 nt, synthetic construct
  source 1..21: mol_type = other RNA
  modified_base 1: mod_base = OTHER; note = 2'-O-methylcytidine with a 3'-phosphorothioate linkage
  modified_base 2: mod_base = OTHER; note = 2'-O-methylguanosine with a 3'-phosphorothioate linkage
  modified_base 3: mod_base = gm
  modified_base 4: mod_base = gm
  modified_base 5: mod_base = cm
  modified_base 6: mod_base = OTHER; note = 2'-O-methyladenosine
  modified_base 7: mod_base = OTHER; note = 2'-O-methyladenosine
  modified_base 8: mod_base = gm
  modified_base 9: mod_base = OTHER; note = 2'-fluorocytidine
  modified_base 10: mod_base = OTHER; note = 2'-fluorocytidine
  modified_base 11: mod_base = OTHER; note = 2'-fluorouridine
  modified_base 12: mod_base = gm
  modified_base 13: mod_base = um
  modified_base 14: mod_base = um
  modified_base 15: mod_base = gm
  modified_base 16: mod_base = gm
  modified_base 17: mod_base = OTHER; note = 2'-O-methyladenosine
  modified_base 18: mod_base = gm
  modified_base 19: mod_base = OTHER; note = 2'-O-methyladenosine with a 3'-phosphorothioate linkage
  modified_base 20: mod_base = OTHER; note = 2'-O-methylcytidine with a 3'-phosphorothioate linkage
  modified_base 21: mod_base = OTHER; note = 2'-O-methyladenosine
cgggcaagcctgttggagaca

SEQ ID NO: 65 - RNA, 21 nt, synthetic construct
  source 1..21: mol_type = other RNA
  modified_base 1: mod_base = OTHER; note = 2'-O-methyladenosine with a 3'-phosphorothioate linkage
  modified_base 2: mod_base = OTHER; note = 2'-O-methyladenosine with a 3'-phosphorothioate linkage
  modified_base 3: mod_base = OTHER; note = 2'-O-methyladenosine
  modified_base 4: mod_base = gm
  modified_base 5: mod_base = gm
  modified_base 6: mod_base = cm
  modified_base 7: mod_base = um
  modified_base 8: mod_base = cm
  modified_base 9: mod_base = OTHER; note = 2'-fluoroadenosine
  modified_base 10: mod_base = OTHER; note = 2'-fluorocytidine
  modified_base 11: mod_base = OTHER; note = 2'-fluoroguanosine
  modified_base 12: mod_base = cm
  modified_base 13: mod_base = um
  modified_base 14: mod_base = gm
  modified_base 15: mod_base = OTHER; note = 2'-O-methyladenosine
  modified_base 16: mod_base = cm
  modified_base 17: mod_base = OTHER; note = 2'-O-methyladenosine
  modified_base 18: mod_base = OTHER; note = 2'-O-methyladenosine
  modified_base 19: mod_base = OTHER; note = 2'-O-methylguanosine with a 3'-phosphorothioate linkage
  modified_base 20: mod_base = OTHER; note = 2'-O-methylcytidine with a 3'-phosphorothioate linkage
  modified_base 21: mod_base = OTHER; note = 2'-O-methyladenosine
aaaggctcacgctgacaagca

SEQ ID NO: 66 - RNA, 21 nt, synthetic construct
  source 1..21: mol_type = other RNA
  modified_base 1: mod_base = OTHER; note = 2'-O-methylguanosine with a 3'-phosphorothioate linkage
  modified_base 2: mod_base = OTHER; note = 2'-O-methyladenosine with a 3'-phosphorothioate linkage
  modified_base 3: mod_base = OTHER; note = 2'-O-methyladenosine
  modified_base 4: mod_base = um
  modified_base 5: mod_base = cm
  modified_base 6: mod_base = um
  modified_base 7: mod_base = gm
  modified_base 8: mod_base = cm
  modified_base 9: mod_base = OTHER; note = 2'-fluorocytidine
  modified_base 10: mod_base = OTHER; note = 2'-fluorouridine
  modified_base 11: mod_base = OTHER; note = 2'-fluoroguanosine
  modified_base 12: mod_base = gm
  modified_base 13: mod_base = OTHER; note = 2'-O-methyladenosine
  modified_base 14: mod_base = um
  modified_base 15: mod_base = gm
  modified_base 16: mod_base = gm
  modified_base 17: mod_base = OTHER; note = 2'-O-methyladenosine
  modified_base 18: mod_base = OTHER; note = 2'-O-methyladenosine
  modified_base 19: mod_base = OTHER; note = 2'-O-methylcytidine with a 3'-phosphorothioate linkage
  modified_base 20: mod_base = OTHER; note = 2'-O-methyluridine with a 3'-phosphorothioate linkage
  modified_base 21: mod_base = OTHER; note = 2'-O-methyladenosine
gaatctgcctggatggaacta

SEQ ID NO: 67 - RNA, 21 nt, synthetic construct
  source 1..21: mol_type = other RNA
  modified_base 1: mod_base = OTHER; note = 2'-O-methylcytidine with a 3'-phosphorothioate linkage
  modified_base 2: mod_base = OTHER; note = 2'-O-methylcytidine with a 3'-phosphorothioate linkage
  modified_base 3: mod_base = um
  modified_base 4: mod_base = gm
  modified_base 5: mod_base = um
  modified_base 6: mod_base = um
  modified_base 7: mod_base = cm
  modified_base 8: mod_base = OTHER; note = 2'-O-methyladenosine
  modified_base 9: mod_base = OTHER; note = 2'-fluorocytidine
  modified_base 10: mod_base = OTHER; note = 2'-fluorouridine
  modified_base 11: mod_base = OTHER; note = 2'-fluoroguanosine
  modified_base 12: mod_base = gm
  modified_base 13: mod_base = gm
  modified_base 14: mod_base = OTHER; note = 2'-O-methyladenosine
  modified_base 15: mod_base = um
  modified_base 16: mod_base = cm
  modified_base 17: mod_base = OTHER; note = 2'-O-methyladenosine
  modified_base 18: mod_base = gm
  modified_base 19: mod_base = OTHER; note = 2'-O-methylcytidine with a 3'-phosphorothioate linkage
  modified_base 20: mod_base = OTHER; note = 2'-O-methylcytidine with a 3'-phosphorothioate linkage
  modified_base 21: mod_base = OTHER; note = 2'-O-methyladenosine
cctgttcactgggatcagcca

SEQ ID NO: 68 - RNA, 21 nt, synthetic construct
  source 1..21: mol_type = other RNA
  modified_base 1: mod_base = OTHER; note = 2'-O-methyladenosine with a 3'-phosphorothioate linkage
  modified_base 2: mod_base = OTHER; note = 2'-O-methyluridine with a 3'-phosphorothioate linkage
  modified_base 3: mod_base = um
  modified_base 4: mod_base = OTHER; note = 2'-O-methyladenosine
  modified_base 5: mod_base = OTHER; note = 2'-O-methyladenosine
  modified_base 6: mod_base = OTHER; note = 2'-O-methyladenosine
  modified_base 7: mod_base = gm
  modified_base 8: mod_base = cm
  modified_base 9: mod_base = OTHER; note = 2'-fluoroadenosine
  modified_base 10: mod_base = OTHER; note = 2'-fluoroguanosine
  modified_base 11: mod_base = OTHER; note = 2'-fluoroadenosine
  modified_base 12: mod_base = gm
  modified_base 13: mod_base = um
  modified_base 14: mod_base = cm
  modified_base 15: mod_base = gm
  modified_base 16: mod_base = um
  modified_base 17: mod_base = gm
  modified_base 18: mod_base = gm
  modified_base 19: mod_base = OTHER; note = 2'-O-methylcytidine with a 3'-phosphorothioate linkage
  modified_base 20: mod_base = OTHER; note = 2'-O-methyladenosine with a 3'-phosphorothioate linkage
  modified_base 21: mod_base = OTHER; note = 2'-O-methyladenosine
attaaagcagagtcgtggcaa

SEQ ID NO: 69 - RNA, 21 nt, synthetic construct
  source 1..21: mol_type = other RNA
  modified_base 1: mod_base = OTHER; note = 2'-O-methyluridine with a 3'-phosphorothioate linkage
  modified_base 2: mod_base = OTHER; note = 2'-O-methylguanosine with a 3'-phosphorothioate linkage
  modified_base 3: mod_base = gm
  modified_base 4: mod_base = um
  modified_base 5: mod_base = gm
  modified_base 6: mod_base = gm
  modified_base 7: mod_base = cm
  modified_base 8: mod_base = OTHER; note = 2'-O-methyladenosine
  modified_base 9: mod_base = OTHER; note = 2'-fluorocytidine
  modified_base 10: mod_base = OTHER; note = 2'-fluoroadenosine
  modified_base 11: mod_base = OTHER; note = 2'-fluoroguanosine
  modified_base 12: mod_base = cm
  modified_base 13: mod_base = OTHER; note = 2'-O-methyladenosine
  modified_base 14: mod_base = gm
  modified_base 15: mod_base = cm
  modified_base 16: mod_base = OTHER; note = 2'-O-methyladenosine
  modified_base 17: mod_base = um
  modified_base 18: mod_base = cm
  modified_base 19: mod_base = OTHER; note = 2'-O-methylguanosine with a 3'-phosphorothioate linkage
  modified_base 20: mod_base = OTHER; note = 2'-O-methylguanosine with a 3'-phosphorothioate linkage
  modified_base 21: mod_base = OTHER; note = 2'-O-methyladenosine
tggtggcacagcagcatcgga

SEQ ID NO: 70 - RNA, 21 nt, synthetic construct
  source 1..21: mol_type = other RNA
  modified_base 1: mod_base = OTHER; note = 2'-O-methyladenosine with a 3'-phosphorothioate linkage
  modified_base 2: mod_base = OTHER; note = 2'-O-methylguanosine with a 3'-phosphorothioate linkage
  modified_base 3: mod_base = gm
  modified_base 4: mod_base = OTHER; note = 2'-O-methyladenosine
  modified_base 5: mod_base = gm
  modified_base 6: mod_base = gm
  modified_base 7: mod_base = OTHER; note = 2'-O-methyladenosine
  modified_base 8: mod_base = um
  modified_base 9: mod_base = OTHER; note = 2'-fluoroadenosine
  modified_base 10: mod_base = OTHER; note = 2'-fluorouridine
  modified_base 11: mod_base = OTHER; note = 2'-fluorouridine
  modified_base 12: mod_base = cm
  modified_base 13: mod_base = um
  modified_base 14: mod_base = gm
  modified_base 15: mod_base = cm
  modified_base 16: mod_base = OTHER; note = 2'-O-methyladenosine
  modified_base 17: mod_base = gm
  modified_base 18: mod_base = cm
  modified_base 19: mod_base = OTHER; note = 2'-O-methyluridine with a 3'-phosphorothioate linkage
  modified_base 20: mod_base = OTHER; note = 2'-O-methylguanosine with a 3'-phosphorothioate linkage
  modified_base 21: mod_base = OTHER; note = 2'-O-methyladenosine
aggaggatattctgcagctga

SEQ ID NO: 71 - RNA, 21 nt, synthetic construct
  source 1..21: mol_type = other RNA
  modified_base 1: mod_base = OTHER; note = 2'-O-methyluridine with a 3'-phosphorothioate linkage
  modified_base 2: mod_base = OTHER; note = 2'-O-methyluridine with a 3'-phosphorothioate linkage
  modified_base 3: mod_base = gm
  modified_base 4: mod_base = OTHER; note = 2'-O-methyladenosine
  modified_base 5: mod_base = gm
  modified_base 6: mod_base = gm
  modified_base 7: mod_base = um
  modified_base 8: mod_base = cm
  modified_base 9: mod_base = OTHER; note = 2'-fluorouridine
  modified_base 10: mod_base = OTHER; note = 2'-fluorouridine
  modified_base 11: mod_base = OTHER; note = 2'-fluoroadenosine
  modified_base 12: mod_base = OTHER; note = 2'-O-methyladenosine
  modified_base 13: mod_base = OTHER; note = 2'-O-methyladenosine
  modified_base 14: mod_base = gm
  modified_base 15: mod_base = gm
  modified_base 16: mod_base = cm
  modified_base 17: mod_base = um
  modified_base 18: mod_base = cm
  modified_base 19: mod_base = OTHER; note = 2'-O-methyladenosine with a 3'-phosphorothioate linkage
  modified_base 20: mod_base = OTHER; note = 2'-O-methylcytidine with a 3'-phosphorothioate linkage
  modified_base 21: mod_base = OTHER; note = 2'-O-methyladenosine
ttgaggtcttaaaggctcaca

SEQ ID NO: 72 - RNA, 21 nt, synthetic construct
  source 1..21: mol_type = other RNA
  modified_base 1: mod_base = OTHER; note = 2'-O-methylguanosine with a 3'-phosphorothioate linkage
  modified_base 2: mod_base = OTHER; note = 2'-O-methylcytidine with a 3'-phosphorothioate linkage
  modified_base 3: mod_base = cm
  modified_base 4: mod_base = cm
  modified_base 5: mod_base = OTHER; note = 2'-O-methyladenosine
  modified_base 6: mod_base = gm
  modified_base 7: mod_base = gm
  modified_base 8: mod_base = OTHER; note = 2'-O-methyladenosine
  modified_base 9: mod_base = OTHER; note = 2'-fluoroadenosine
  modified_base 10: mod_base = OTHER; note = 2'-fluorocytidine
  modified_base 11: mod_base = OTHER; note = 2'-fluorouridine
  modified_base 12: mod_base = um
  modified_base 13: mod_base = cm
  modified_base 14: mod_base = gm
  modified_base 15: mod_base = gm
  modified_base 16: mod_base = gm
  modified_base 17: mod_base = cm
  modified_base 18: mod_base = OTHER; note = 2'-O-methyladenosine
  modified_base 19: mod_base = OTHER; note = 2'-O-methyladenosine with a 3'-phosphorothioate linkage
  modified_base 20: mod_base = OTHER; note = 2'-O-methylguanosine with a 3'-phosphorothioate linkage
  modified_base 21: mod_base = OTHER; note = 2'-O-methyladenosine
gcccaggaacttcgggcaaga

SEQ ID NO: 73 - RNA, 21 nt, synthetic construct
  source 1..21: mol_type = other RNA
  modified_base 1: mod_base = OTHER; note = 2'-O-methyluridine with a 3'-phosphorothioate linkage
  modified_base 2: mod_base = OTHER; note = 2'-O-methyladenosine with a 3'-phosphorothioate linkage
  modified_base 3: mod_base = gm
  modified_base 4: mod_base = OTHER; note = 2'-O-methyladenosine
  modified_base 5: mod_base = OTHER; note = 2'-O-methyladenosine
  modified_base 6: mod_base = gm
  modified_base 7: mod_base = um
  modified_base 8: mod_base = cm
  modified_base 9: mod_base = OTHER; note = 2'-fluorocytidine
  modified_base 10: mod_base = OTHER; note = 2'-fluoroadenosine
  modified_base 11: mod_base = OTHER; note = 2'-fluoroguanosine
  modified_base 12: mod_base = cm
  modified_base 13: mod_base = um
  modified_base 14: mod_base = gm
  modified_base 15: mod_base = OTHER; note = 2'-O-methyladenosine
  modified_base 16: mod_base = gm
  modified_base 17: mod_base = gm
  modified_base 18: mod_base = OTHER; note = 2'-O-methyladenosine
  modified_base 19: mod_base = OTHER; note = 2'-O-methylguanosine with a 3'-phosphorothioate linkage
  modified_base 20: mod_base = OTHER; note = 2'-O-methylcytidine with a 3'-phosphorothioate linkage
  modified_base 21: mod_base = OTHER; note = 2'-O-methyladenosine
tagaagtccagctgaggagca

SEQ ID NO: 74 - RNA, 21 nt, synthetic construct
  source 1..21: mol_type = other RNA
  modified_base 1: mod_base = OTHER; note = 2'-O-methylcytidine with a 3'-phosphorothioate linkage
  modified_base 2: mod_base = OTHER; note = 2'-O-methyluridine with a 3'-phosphorothioate linkage
  modified_base 3: mod_base = gm
  modified_base 4: mod_base = cm
  modified_base 5: mod_base = cm
  modified_base 6: mod_base = um
  modified_base 7: mod_base = gm
  modified_base 8: mod_base = um
  modified_base 9: mod_base = OTHER; note = 2'-fluorouridine
  modified_base 10: mod_base = OTHER; note = 2'-fluorocytidine
  modified_base 11: mod_base = OTHER; note = 2'-fluoroadenosine
  modified_base 12: mod_base = cm
  modified_base 13: mod_base = um
  modified_base 14: mod_base = gm
  modified_base 15: mod_base = gm
  modified_base 16: mod_base = gm
  modified_base 17: mod_base = OTHER; note = 2'-O-methyladenosine
  modified_base 18: mod_base = um
  modified_base 19: mod_base = OTHER; note = 2'-O-methylcytidine with a 3'-phosphorothioate linkage
  modified_base 20: mod_base = OTHER; note = 2'-O-methyladenosine with a 3'-phosphorothioate linkage
  modified_base 21: mod_base = OTHER; note = 2'-O-methyladenosine
ctgcctgttcactgggatcaa

SEQ ID NO: 75 - RNA, 21 nt, synthetic construct
  source 1..21: mol_type = other RNA
  modified_base 1: mod_base = OTHER; note = 2'-O-methyluridine with a 3'-phosphorothioate linkage
  modified_base 2: mod_base = OTHER; note = 2'-O-methylcytidine with a 3'-phosphorothioate linkage
  modified_base 3: mod_base = um
  modified_base 4: mod_base = gm
  modified_base 5: mod_base = cm
  modified_base 6: mod_base = cm
  modified_base 7: mod_base = um
  modified_base 8: mod_base = gm
  modified_base 9: mod_base = OTHER; note = 2'-fluoroguanosine
  modified_base 10: mod_base = OTHER; note = 2'-fluoroadenosine
  modified_base 11: mod_base = OTHER; note = 2'-fluorouridine
  modified_base 12: mod_base = gm
  modified_base 13: mod_base = gm
  modified_base 14: mod_base = OTHER; note = 2'-O-methyladenosine
  modified_base 15: mod_base = OTHER; note = 2'-O-methyladenosine
  modified_base 16: mod_base = cm
  modified_base 17: mod_base = um
  modified_base 18: mod_base = gm
  modified_base 19: mod_base = OTHER; note = 2'-O-methyladenosine with a 3'-phosphorothioate linkage
  modified_base 20: mod_base = OTHER; note = 2'-O-methylguanosine with a 3'-phosphorothioate linkage
  modified_base 21: mod_base = OTHER; note = 2'-O-methyladenosine
tctgcctggatggaactgaga

SEQ ID NO: 76 - RNA, 21 nt, synthetic construct
  source 1..21: mol_type = other RNA
  modified_base 1: mod_base = OTHER; note = 2'-O-methylcytidine with a 3'-phosphorothioate linkage
  modified_base 2: mod_base = OTHER; note = 2'-O-methyladenosine with a 3'-phosphorothioate linkage
  modified_base 3: mod_base = cm
  modified_base 4: mod_base = gm
  modified_base 5: mod_base = cm
  modified_base 6: mod_base = um
  modified_base 7: mod_base = gm
  modified_base 8: mod_base = OTHER; note = 2'-O-methyladenosine
  modified_base 9: mod_base = OTHER; note = 2'-fluorocytidine
  modified_base 10: mod_base = OTHER; note = 2'-fluoroadenosine
  modified_base 11: mod_base = OTHER; note = 2'-fluoroadenosine
  modified_base 12: mod_base = gm
  modified_base 13: mod_base = cm
  modified_base 14: mod_base = OTHER; note = 2'-O-methyladenosine
  modified_base 15: mod_base = gm
  modified_base 16: mod_base = OTHER; note = 2'-O-methyladenosine
  modified_base 17: mod_base = gm
  modified_base 18: mod_base = cm
  modified_base 19: mod_base = OTHER; note = 2'-O-methylcytidine with a 3'-phosphorothioate linkage
  modified_base 20: mod_base = OTHER; note = 2'-O-methyladenosine with a 3'-phosphorothioate linkage
  modified_base 21: mod_base = OTHER; note = 2'-O-methyladenosine
cacgctgacaagcagagccaa

SEQ ID NO: 77 - RNA, 21 nt, synthetic construct
  source 1..21: mol_type = other RNA
  modified_base 1: mod_base = OTHER; note = 2'-O-methyluridine with a 3'-phosphorothioate linkage
  modified_base 2: mod_base = OTHER; note = 2'-O-methylguanosine with a 3'-phosphorothioate linkage
  modified_base 3: mod_base = cm
  modified_base 4: mod_base = cm
  modified_base 5: mod_base = um
  modified_base 6: mod_base = gm
  modified_base 7: mod_base = gm
  modified_base 8: mod_base = OTHER; note = 2'-O-methyladenosine
  modified_base 9: mod_base = OTHER; note = 2'-fluorouridine
  modified_base 10: mod_base = OTHER; note = 2'-fluoroguanosine
  modified_base 11: mod_base = OTHER; note = 2'-fluoroguanosine
  modified_base 12: mod_base = OTHER; note = 2'-O-methyladenosine
  modified_base 13: mod_base = OTHER; note = 2'-O-methyladenosine
  modified_base 14: mod_base = cm
  modified_base 15: mod_base = um
  modified_base 16: mod_base = gm
  modified_base 17: mod_base = OTHER; note = 2'-O-methyladenosine
  modified_base 18: mod_base = gm
  modified_base 19: mod_base = OTHER; note = 2'-O-methylguanosine with a 3'-phosphorothioate linkage
  modified_base 20: mod_base = OTHER; note = 2'-O-methyladenosine with a 3'-phosphorothioate linkage
  modified_base 21: mod_base = OTHER; note = 2'-O-methyladenosine
tgcctggatggaactgaggaa

SEQ ID NO: 78 - RNA, 21 nt, synthetic construct
  source 1..21: mol_type = other RNA
  modified_base 1: mod_base = OTHER; note = 2'-O-methylguanosine with a 3'-phosphorothioate linkage
  modified_base 2: mod_base = OTHER; note = 2'-O-methyladenosine with a 3'-phosphorothioate linkage
  modified_base 3: mod_base = um
  modified_base 4: mod_base = gm
  modified_base 5: mod_base = gm
  modified_base 6: mod_base = um
  modified_base 7: mod_base = gm
  modified_base 8: mod_base = gm
  modified_base 9: mod_base = OTHER; note = 2'-fluorocytidine
  modified_base 10: mod_base = OTHER; note = 2'-fluoroadenosine
  modified_base 11: mod_base = OTHER; note = 2'-fluorocytidine
  modified_base 12: mod_base = OTHER; note = 2'-O-methyladenosine
  modified_base 13: mod_base = gm
  modified_base 14: mod_base = cm
  modified_base 15: mod_base = OTHER; note = 2'-O-methyladenosine
  modified_base 16: mod_base = gm
  modified_base 17: mod_base = cm
  modified_base 18: mod_base = OTHER; note = 2'-O-methyladenosine
  modified_base 19: mod_base = OTHER; note = 2'-O-methyluridine with a 3'-phosphorothioate linkage
  modified_base 20: mod_base = OTHER; note = 2'-O-methylcytidine with a 3'-phosphorothioate linkage
  modified_base 21: mod_base = OTHER; note = 2'-O-methyladenosine
gatggtggcacagcagcatca

SEQ ID NO: 79 - RNA, 21 nt, synthetic construct
  source 1..21: mol_type = other RNA
  modified_base 1: mod_base = OTHER; note = 2'-O-methylguanosine with a 3'-phosphorothioate linkage
  modified_base 2: mod_base = OTHER; note = 2'-O-methyluridine with a 3'-phosphorothioate linkage
  modified_base 3: mod_base = cm
  modified_base 4: mod_base = um
  modified_base 5: mod_base = um
  modified_base 6: mod_base = OTHER; note = 2'-O-methyladenosine
  modified_base 7: mod_base = OTHER; note = 2'-O-methyladenosine
  modified_base 8: mod_base = OTHER; note = 2'-O-methyladenosine
  modified_base 9: mod_base = OTHER; note = 2'-fluoroguanosine
  modified_base 10: mod_base = OTHER; note = 2'-fluoroguanosine
  modified_base 11: mod_base = OTHER; note = 2'-fluorocytidine
  modified_base 12: mod_base = um
  modified_base 13: mod_base = cm
  modified_base 14: mod_base = OTHER; note = 2'-O-methyladenosine
  modified_base 15: mod_base = cm
  modified_base 16: mod_base = gm
  modified_base 17: mod_base = cm
  modified_base 18: mod_base = um
  modified_base 19: mod_base = OTHER; note = 2'-O-methylguanosine with a 3'-phosphorothioate linkage
  modified_base 20: mod_base = OTHER; note = 2'-O-methyladenosine with a 3'-phosphorothioate linkage
  modified_base 21: mod_base = OTHER; note = 2'-O-methyladenosine
gtcttaaaggctcacgctgaa

SEQ ID NO: 80 - RNA, 21 nt, synthetic construct
  source 1..21: mol_type = other RNA
  modified_base 1: mod_base = OTHER; note = 2'-O-methylguanosine with a 3'-phosphorothioate linkage
  modified_base 2: mod_base = OTHER; note = 2'-O-methyladenosine with a 3'-phosphorothioate linkage
  modified_base 3: mod_base = um
  modified_base 4: mod_base = gm
  modified_base 5: mod_base = cm
  modified_base 6: mod_base = OTHER; note = 2'-O-methyladenosine
  modified_base 7: mod_base = gm
  modified_base 8: mod_base = cm
  modified_base 9: mod_base = OTHER; note = 2'-fluorocytidine
  modified_base 10: mod_base = OTHER; note = 2'-fluorocytidine
  modified_base 11: mod_base = OTHER; note = 2'-fluoroadenosine
  modified_base 12: mod_base = gm
  modified_base 13: mod_base = gm
  modified_base 14: mod_base = OTHER; note = 2'-O-methyladenosine
  modified_base 15: mod_base = OTHER; note = 2'-O-methyladenosine
  modified_base 16: mod_base = cm
  modified_base 17: mod_base = um
  modified_base 18: mod_base = um
  modified_base 19: mod_base = OTHER; note = 2'-O-methylcytidine with a 3'-phosphorothioate linkage
  modified_base 20: mod_base = OTHER; note = 2'-O-methylguanosine with a 3'-phosphorothioate linkage
  modified_base 21: mod_base = OTHER; note = 2'-O-methyladenosine
gatgcagcccaggaacttcga

SEQ ID NO: 81 - RNA, 21 nt, synthetic construct
  source 1..21: mol_type = other RNA
  modified_base 1: mod_base = OTHER; note = 2'-O-methylguanosine with a 3'-phosphorothioate linkage
  modified_base 2: mod_base = OTHER; note = 2'-O-methyladenosine with a 3'-phosphorothioate linkage
  modified_base 3: mod_base = gm
  modified_base 4: mod_base = OTHER; note = 2'-O-methyladenosine
  modified_base 5: mod_base = OTHER; note = 2'-O-methyladenosine
  modified_base 6: mod_base = um
  modified_base 7: mod_base = um
  modified_base 8: mod_base = um
  modified_base 9: mod_base = OTHER; note = 2'-fluoroguanosine
  modified_base 10: mod_base = OTHER; note = 2'-fluoroadenosine
  modified_base 11: mod_base = OTHER; note = 2'-fluoroguanosine
  modified_base 12: mod_base = gm
  modified_base 13: mod_base = um
  modified_base 14: mod_base = cm
  modified_base 15: mod_base = um
  modified_base 16: mod_base = um
  modified_base 17: mod_base = OTHER; note = 2'-O-methyladenosine
  modified_base 18: mod_base = OTHER; note = 2'-O-methyladenosine
  modified_base 19: mod_base = OTHER; note = 2'-O-methyladenosine with a 3'-phosphorothioate linkage
  modified_base 20: mod_base = OTHER; note = 2'-O-methylguanosine with a 3'-phosphorothioate linkage
  modified_base 21: mod_base = OTHER; note = 2'-O-methyladenosine
gagaatttgaggtcttaaaga

SEQ ID NO: 82 - RNA, 21 nt, synthetic construct
  source 1..21: mol_type = other RNA
  modified_base 1: mod_base = OTHER; note = 2'-O-methylguanosine with a 3'-phosphorothioate linkage
  modified_base 2: mod_base = OTHER; note = 2'-O-methyladenosine with a 3'-phosphorothioate linkage
  modified_base 3: mod_base = um
  modified_base 4: mod_base = gm
  modified_base 5: mod_base = gm
  modified_base 6: mod_base = OTHER; note = 2'-O-methyladenosine
  modified_base 7: mod_base = gm
  modified_base 8: mod_base = gm
  modified_base 9: mod_base = OTHER; note = 2'-fluoroadenosine
  modified_base 10: mod_base = OTHER; note = 2'-fluoroguanosine
  modified_base 11: mod_base = OTHER; note = 2'-fluoroguanosine
  modified_base 12: mod_base = OTHER; note = 2'-O-methyladenosine
  modified_base 13: mod_base = um
  modified_base 14: mod_base = OTHER; note = 2'-O-methyladenosine
  modified_base 15: mod_base = um
  modified_base 16: mod_base = um
  modified_base 17: mod_base = cm
  modified_base 18: mod_base = um
  modified_base 19: mod_base = OTHER; note = 2'-O-methylguanosine with a 3'-phosphorothioate linkage
  modified_base 20: mod_base = OTHER; note = 2'-O-methylcytidine with a 3'-phosphorothioate linkage
  modified_base 21: mod_base = OTHER; note = 2'-O-methyladenosine
gatggaggaggatattctgca

SEQ ID NO: 83 - RNA, 21 nt, synthetic construct
  source 1..21: mol_type = other RNA
  modified_base 1: mod_base = OTHER; note = 2'-O-methyluridine with a 3'-phosphorothioate linkage
  modified_base 2: mod_base = OTHER; note = 2'-O-methylguanosine with a 3'-phosphorothioate linkage
  modified_base 3: mod_base = OTHER; note = 2'-O-methyladenosine
  modified_base 4: mod_base = cm
  modified_base 5: mod_base = OTHER; note = 2'-O-methyladenosine
  modified_base 6: mod_base = OTHER; note = 2'-O-methyladenosine
  modified_base 7: mod_base = OTHER; note = 2'-O-methyladenosine
  modified_base 8: mod_base = gm
  modified_base 9: mod_base = OTHER; note = 2'-fluoroguanosine
  modified_base 10: mod_base = OTHER; note = 2'-fluorocytidine
  modified_base 11: mod_base = OTHER; note = 2'-fluorocytidine
  modified_base 12: mod_base = OTHER; note = 2'-O-methyladenosine
  modified_base 13: mod_base = gm
  modified_base 14: mod_base = gm
  modified_base 15: mod_base = OTHER; note = 2'-O-methyladenosine
  modified_base 16: mod_base = OTHER; note = 2'-O-methyladenosine
  modified_base 17: mod_base = cm
  modified_base 18: mod_base = OTHER; note = 2'-O-methyladenosine
  modified_base 19: mod_base = OTHER; note = 2'-O-methylguanosine with a 3'-phosphorothioate linkage
  modified_base 20: mod_base = OTHER; note = 2'-O-methylcytidine with a 3'-phosphorothioate linkage
  modified_base 21: mod_base = OTHER; note = 2'-O-methyladenosine
tgacaaaggccaggaacagca

SEQ ID NO: 84 - RNA, 21 nt, synthetic construct
  source 1..21: mol_type = other RNA
  modified_base 1: mod_base = OTHER; note = 2'-O-methylcytidine with a 3'-phosphorothioate linkage
  modified_base 2: mod_base = OTHER; note = 2'-O-methyluridine with a 3'-phosphorothioate linkage
  modified_base 3: mod_base = cm
  modified_base 4: mod_base = OTHER; note = 2'-O-methyladenosine
  modified_base 5: mod_base = cm
  modified_base 6: mod_base = gm
  modified_base 7: mod_base = cm
  modified_base 8: mod_base = um
  modified_base 9: mod_base = OTHER; note = 2'-fluoroguanosine
  modified_base 10: mod_base = OTHER; note = 2'-fluoroadenosine
  modified_base 11: mod_base = OTHER; note = 2'-fluorocytidine
  modified_base 12: mod_base = OTHER; note = 2'-O-methyladenosine
  modified_base 13: mod_base = OTHER; note = 2'-O-methyladenosine
  modified_base 14: mod_base = gm
  modified_base 15: mod_base = cm
  modified_base 16: mod_base = OTHER; note = 2'-O-methyladenosine
  modified_base 17: mod_base = gm
  modified_base 18: mod_base = OTHER; note = 2'-O-methyladenosine
  modified_base 19: mod_base = OTHER; note = 2'-O-methylguanosine with a 3'-phosphorothioate linkage
  modified_base 20: mod_base = OTHER; note = 2'-O-methylcytidine with a 3'-phosphorothioate linkage
  modified_base 21: mod_base = OTHER; note = 2'-O-methyladenosine
ctcacgctgacaagcagagca

SEQ ID NO: 85 - RNA, 21 nt, synthetic construct
  source 1..21: mol_type = other RNA
  modified_base 1: mod_base = OTHER; note = 2'-O-methylguanosine with a 3'-phosphorothioate linkage
  modified_base 2: mod_base = OTHER; note = 2'-O-methylcytidine with a 3'-phosphorothioate linkage
  modified_base 3: mod_base = cm
  modified_base 4: mod_base = um
  modified_base 5: mod_base = gm
  modified_base 6: mod_base = OTHER; note = 2'-O-methyladenosine
  modified_base 7: mod_base = OTHER; note = 2'-O-methyladenosine
  modified_base 8: mod_base = um
  modified_base 9: mod_base = OTHER; note = 2'-fluorocytidine
  modified_base 10: mod_base = OTHER; note = 2'-fluorouridine
  modified_base 11: mod_base = OTHER; note = 2'-fluoroguanosine
  modified_base 12: mod_base = cm
  modified_base 13: mod_base = cm
  modified_base 14: mod_base = um
  modified_base 15: mod_base = gm
  modified_base 16: mod_base = gm
  modified_base 17: mod_base = OTHER; note = 2'-O-methyladenosine
  modified_base 18: mod_base = um
  modified_base 19: mod_base = OTHER; note = 2'-O-methylguanosine with a 3'-phosphorothioate linkage
  modified_base 20: mod_base = OTHER; note = 2'-O-methylguanosine with a 3'-phosphorothioate linkage
  modified_base 21: mod_base = OTHER; note = 2'-O-methyladenosine
gcctgaatctgcctggatgga

SEQ ID NO: 86 - RNA, 21 nt, synthetic construct
  source 1..21: mol_type = other RNA
  modified_base 1: mod_base = OTHER; note = 2'-O-methyladenosine with a 3'-phosphorothioate linkage
  modified_base 2: mod_base = OTHER; note = 2'-O-methylcytidine with a 3'-phosphorothioate linkage
  modified_base 3: mod_base = OTHER; note = 2'-O-methyladenosine
  modified_base 4: mod_base = gm
  modified_base 5: mod_base = cm
  modified_base 6: mod_base = cm
  modified_base 7: mod_base = um
  modified_base 8: mod_base = gm
  modified_base 9: mod_base = OTHER; note = 2'-fluoroguanosine
  modified_base 10: mod_base = OTHER; note = 2'-fluoroguanosine
  modified_base 11: mod_base = OTHER; note = 2'-fluorouridine
  modified_base 12: mod_base = cm
  modified_base 13: mod_base = um
  modified_base 14: mod_base = cm
  modified_base 15: mod_base = um
  modified_base 16: mod_base = OTHER; note = 2'-O-methyladenosine
  modified_base 17: mod_base = um
  modified_base 18: mod_base = gm
  modified_base 19: mod_base = OTHER; note = 2'-O-methylguanosine with a 3'-phosphorothioate linkage
  modified_base 20: mod_base = OTHER; note = 2'-O-methylcytidine with a 3'-phosphorothioate linkage
  modified_base 21: mod_base = OTHER; note = 2'-O-methyladenosine
acagcctgggtctctatggca

SEQ ID NO: 87 - RNA, 21 nt, synthetic construct
  source 1..21: mol_type = other RNA
  modified_base 1: mod_base = OTHER; note = 2'-O-methylcytidine with a 3'-phosphorothioate linkage
  modified_base 2: mod_base = OTHER; note = 2'-O-methyladenosine with a 3'-phosphorothioate linkage
  modified_base 3: mod_base = gm
  modified_base 4: mod_base = gm
  modified_base 5: mod_base = OTHER; note = 2'-O-methyladenosine
  modified_base 6: mod_base = OTHER; note = 2'-O-methyladenosine
  modified_base 7: mod_base = cm
  modified_base 8: mod_base = um
  modified_base 9: mod_base = OTHER; note = 2'-fluorouridine
  modified_base 10: mod_base = OTHER; note = 2'-fluorocytidine
  modified_base 11: mod_base = OTHER; note = 2'-fluoroguanosine
  modified_base 12: mod_base = gm
  modified_base 13: mod_base = gm
  modified_base 14: mod_base = cm
  modified_base 15: mod_base = OTHER; note = 2'-O-methyladenosine
  modified_base 16: mod_base = OTHER; note = 2'-O-methyladenosine
  modified_base 17: mod_base = gm
  modified_base 18: mod_base = cm
  modified_base 19: mod_base = OTHER; note = 2'-O-methylcytidine with a 3'-phosphorothioate linkage
  modified_base 20: mod_base = OTHER; note = 2'-O-methyluridine with a 3'-phosphorothioate linkage
  modified_base 21: mod_base = OTHER; note = 2'-O-methyladenosine
caggaacttcgggcaagccta

SEQ ID NO: 88 - RNA, 21 nt, synthetic construct
  source 1..21: mol_type = other RNA
  modified_base 1: mod_base = OTHER; note = 2'-O-methylguanosine with a 3'-phosphorothioate linkage
  modified_base 2: mod_base = OTHER; note = 2'-O-methylcytidine with a 3'-phosphorothioate linkage
  modified_base 3: mod_base = OTHER; note = 2'-O-methyladenosine
  modified_base 4: mod_base = OTHER; note = 2'-O-methyladenosine
  modified_base 5: mod_base = gm
  modified_base 6: mod_base = gm
  modified_base 7: mod_base = OTHER; note = 2'-O-methyladenosine
  modified_base 8: mod_base = OTHER; note = 2'-O-methyladenosine
  modified_base 9: mod_base = OTHER; note = 2'-fluorocytidine
  modified_base 10: mod_base = OTHER; note = 2'-fluoroadenosine
  modified_base 11: mod_base = OTHER; note = 2'-fluorocytidine
  modified_base 12: mod_base = um
  modified_base 13: mod_base = um
  modified_base 14: mod_base = cm
  modified_base 15: mod_base = cm
  modified_base 16: mod_base = OTHER; note = 2'-O-methyladenosine
  modified_base 17: mod_base = cm
  modified_base 18: mod_base = gm
  modified_base 19: mod_base = OTHER; note = 2'-O-methylcytidine with a 3'-phosphorothioate linkage
  modified_base 20: mod_base = OTHER; note = 2'-O-methylcytidine with a 3'-phosphorothioate linkage
  modified_base 21: mod_base = OTHER; note = 2'-O-methyladenosine
gcaaggaacacttccacgcca

SEQ ID NO: 89 - RNA, 21 nt, synthetic construct
  source 1..21: mol_type = other RNA
  modified_base 1: mod_base = OTHER; note = 2'-O-methyluridine with a 3'-phosphorothioate linkage
  modified_base 2: mod_base = OTHER; note = 2'-O-methyluridine with a 3'-phosphorothioate linkage
  modified_base 3: mod_base = um
  modified_base 4: mod_base = gm
  modified_base 5: mod_base = OTHER; note = 2'-O-methyladenosine
  modified_base 6: mod_base = gm
  modified_base 7: mod_base = gm
  modified_base 8: mod_base = um
  modified_base 9: mod_base = OTHER; note = 2'-fluorocytidine
  modified_base 10: mod_base = OTHER; note = 2'-fluorouridine
  modified_base 11: mod_base = OTHER; note = 2'-fluorouridine
  modified_base 12: mod_base = OTHER; note = 2'-O-methyladenosine
  modified_base 13: mod_base = OTHER; note = 2'-O-methyladenosine
  modified_base 14: mod_base = OTHER; note = 2'-O-methyladenosine
  modified_base 15: mod_base = gm
  modified_base 16: mod_base = gm
  modified_base 17: mod_base = cm
  modified_base 18: mod_base = um
  modified_base 19: mod_base = OTHER; note = 2'-O-methylcytidine with a 3'-phosphorothioate linkage
  modified_base 20: mod_base = OTHER; note = 2'-O-methyladenosine with a 3'-phosphorothioate linkage
  modified_base 21: mod_base = OTHER; note = 2'-O-methyladenosine
tttgaggtcttaaaggctcaa

SEQ ID NO: 90 - RNA, 21 nt, synthetic construct
  source 1..21: mol_type = other RNA
  modified_base 1: mod_base = OTHER; note = 2'-O-methylguanosine with a 3'-phosphorothioate linkage
  modified_base 2: mod_base = OTHER; note = 2'-O-methylguanosine with a 3'-phosphorothioate linkage
  modified_base 3: mod_base = cm
  modified_base 4: mod_base = cm
  modified_base 5: mod_base = cm
  modified_base 6: mod_base = OTHER; note = 2'-O-methyladenosine
  modified_base 7: mod_base = gm
  modified_base 8: mod_base = gm
  modified_base 9: mod_base = OTHER; note = 2'-fluorocytidine
  modified_base 10: mod_base = OTHER; note = 2'-fluoroadenosine
  modified_base 11: mod_base = OTHER; note = 2'-fluorocytidine
  modified_base 12: mod_base = OTHER; note = 2'-O-methyladenosine
  modified_base 13: mod_base = gm
  modified_base 14: mod_base = OTHER; note = 2'-O-methyladenosine
  modified_base 15: mod_base = OTHER; note = 2'-O-methyladenosine
  modified_base 16: mod_base = gm
  modified_base 17: mod_base = gm
  modified_base 18: mod_base = um
  modified_base 19: mod_base = OTHER; note = 2'-O-methylguanosine with a 3'-phosphorothioate linkage
  modified_base 20: mod_base = OTHER; note = 2'-O-methylcytidine with a 3'-phosphorothioate linkage
  modified_base 21: mod_base = OTHER; note = 2'-O-methyladenosine
ggcccaggcacagaaggtgca

SEQ ID NO: 91 - RNA, 21 nt, synthetic construct
  source 1..21: mol_type = other RNA
  modified_base 1: mod_base = OTHER; note = 2'-O-methyluridine with a 3'-phosphorothioate linkage
  modified_base 2: mod_base = OTHER; note = 2'-O-methylcytidine with a 3'-phosphorothioate linkage
  modified_base 3: mod_base = OTHER; note = 2'-O-methyladenosine
  modified_base 4: mod_base = gm
  modified_base 5: mod_base = OTHER; note = 2'-O-methyladenosine
  modified_base 6: mod_base = um
  modified_base 7: mod_base = gm
  modified_base 8: mod_base = gm
  modified_base 9: mod_base = OTHER; note = 2'-fluoroadenosine
  modified_base 10: mod_base = OTHER; note = 2'-fluoroguanosine
  modified_base 11: mod_base = OTHER; note = 2'-fluoroguanosine
  modified_base 12: mod_base = OTHER; note = 2'-O-methyladenosine
  modified_base 13: mod_base = gm
  modified_base 14: mod_base = gm
  modified_base 15: mod_base = OTHER; note = 2'-O-methyladenosine
  modified_base 16: mod_base = um
  modified_base 17: mod_base = OTHER; note = 2'-O-methyladenosine
  modified_base 18: mod_base = um
  modified_base 19: mod_base = OTHER; note = 2'-O-methyluridine with a 3'-phosphorothioate linkage
  modified_base 20: mod_base = OTHER; note = 2'-O-methylcytidine with a 3'-phosphorothioate linkage
  modified_base 21: mod_base = OTHER; note = 2'-O-methyladenosine
tcagatggaggaggatattca

SEQ ID NO: 92 - RNA, 21 nt, synthetic construct
  source 1..21: mol_type = other RNA
  modified_base 1: mod_base = OTHER; note = 2'-O-methylcytidine with a 3'-phosphorothioate linkage
  modified_base 2: mod_base = OTHER; note = 2'-O-methylcytidine with a 3'-phosphorothioate linkage
  modified_base 3: mod_base = OTHER; note = 2'-O-methyladenosine
  modified_base 4: mod_base = gm
  modified_base 5: mod_base = gm
  modified_base 6: mod_base = OTHER; note = 2'-O-methyladenosine
  modified_base 7: mod_base = OTHER; note = 2'-O-methyladenosine
  modified_base 8: mod_base = cm
  modified_base 9: mod_base = OTHER; note = 2'-fluorouridine
  modified_base 10: mod_base = OTHER; note = 2'-fluorouridine
  modified_base 11: mod_base = OTHER; note = 2'-fluorocytidine
  modified_base 12: mod_base = gm
  modified_base 13: mod_base = gm
  modified_base 14: mod_base = gm
  modified_base 15: mod_base = cm
  modified_base 16: mod_base = OTHER; note = 2'-O-methyladenosine
  modified_base 17: mod_base = OTHER; note = 2'-O-methyladenosine
  modified_base 18: mod_base = gm
  modified_base 19: mod_base = OTHER; note = 2'-O-methylcytidine with a 3'-phosphorothioate linkage
  modified_base 20: mod_base = OTHER; note = 2'-O-methylcytidine with a 3'-phosphorothioate linkage
  modified_base 21: mod_base = OTHER; note = 2'-O-methyladenosine
ccaggaacttcgggcaagcca

SEQ ID NO: 93 - RNA, 21 nt, synthetic construct
  source 1..21: mol_type = other RNA
  modified_base 1: mod_base = OTHER; note = 2'-O-methylcytidine with a 3'-phosphorothioate linkage
  modified_base 2: mod_base = OTHER; note = 2'-O-methyladenosine with a 3'-phosphorothioate linkage
  modified_base 3: mod_base = gm
  modified_base 4: mod_base = cm
  modified_base 5: mod_base = cm
  modified_base 6: mod_base = cm
  modified_base 7: mod_base = OTHER; note = 2'-O-methyladenosine
  modified_base 8: mod_base = gm
  modified_base 9: mod_base = OTHER; note = 2'-fluoroguanosine
  modified_base 10: mod_base = OTHER; note = 2'-fluoroadenosine
  modified_base 11: mod_base = OTHER; note = 2'-fluoroadenosine
  modified_base 12: mod_base = cm
  modified_base 13: mod_base = um
  modified_base 14: mod_base = um
  modified_base 15: mod_base = cm
  modified_base 16: mod_base = gm
  modified_base 17: mod_base = gm
  modified_base 18: mod_base = gm
  modified_base 19: mod_base = OTHER; note = 2'-O-methylcytidine with a 3'-phosphorothioate linkage
  modified_base 20: mod_base = OTHER; note = 2'-O-methyladenosine with a 3'-phosphorothioate linkage
  modified_base 21: mod_base = OTHER; note = 2'-O-methyladenosine
cagcccaggaacttcgggcaa

SEQ ID NO: 94 - RNA, 21 nt, synthetic construct
  source 1..21: mol_type = other RNA
  modified_base 1: mod_base = OTHER; note = 2'-O-methylcytidine with a 3'-phosphorothioate linkage
  modified_base 2: mod_base = OTHER; note = 2'-O-methylcytidine with a 3'-phosphorothioate linkage
  modified_base 3: mod_base = cm
  modified_base 4: mod_base = OTHER; note = 2'-O-methyladenosine
  modified_base 5: mod_base = gm
  modified_base 6: mod_base = cm
  modified_base 7: mod_base = cm
  modified_base 8: mod_base = um
  modified_base 9: mod_base = OTHER; note = 2'-fluoroguanosine
  modified_base 10: mod_base = OTHER; note = 2'-fluoroadenosine
  modified_base 11: mod_base = OTHER; note = 2'-fluoroadenosine
  modified_base 12: mod_base = um
  modified_base 13: mod_base = cm
  modified_base 14: mod_base = um
  modified_base 15: mod_base = gm
  modified_base 16: mod_base = cm
  modified_base 17: mod_base = cm
  modified_base 18: mod_base = um
  modified_base 19: mod_base = OTHER; note = 2'-O-methylguanosine with a 3'-phosphorothioate linkage
  modified_base 20: mod_base = OTHER; note = 2'-O-methylguanosine with a 3'-phosphorothioate linkage
  modified_base 21: mod_base = OTHER; note = 2'-O-methyladenosine
cccagcctgaatctgcctgga

SEQ ID NO: 95 - RNA, 21 nt, synthetic construct
  source 1..21: mol_type = other RNA
  modified_base 1: mod_base = OTHER; note = 2'-O-methylcytidine with a 3'-phosphorothioate linkage
  modified_base 2: mod_base = OTHER; note = 2'-O-methylcytidine with a 3'-phosphorothioate linkage
  modified_base 3: mod_base = cm
  modified_base 4: mod_base = OTHER; note = 2'-O-methyladenosine
  modified_base 5: mod_base = gm
  modified_base 6: mod_base = gm
  modified_base 7: mod_base = OTHER; note = 2'-O-methyladenosine
  modified_base 8: mod_base = OTHER; note = 2'-O-methyladenosine
  modified_base 9: mod_base = OTHER; note = 2'-fluorocytidine
  modified_base 10: mod_base = OTHER; note = 2'-fluorouridine
  modified_base 11: mod_base = OTHER; note = 2'-fluorouridine
  modified_base 12: mod_base = cm
  modified_base 13: mod_base = gm
  modified_base 14: mod_base = gm
  modified_base 15: mod_base = gm
  modified_base 16: mod_base = cm
  modified_base 17: mod_base = OTHER; note = 2'-O-methyladenosine
  modified_base 18: mod_base = OTHER; note = 2'-O-methyladenosine
  modified_base 19: mod_base = OTHER; note = 2'-O-methylguanosine with a 3'-phosphorothioate linkage
  modified_base 20: mod_base = OTHER; note = 2'-O-methylcytidine with a 3'-phosphorothioate linkage
  modified_base 21: mod_base = OTHER; note = 2'-O-methyladenosine
cccaggaacttcgggcaagca

SEQ ID NO: 96 - RNA, 21 nt, synthetic construct
  source 1..21: mol_type = other RNA
  modified_base 1: mod_base = OTHER; note = 2'-O-methylcytidine with a 3'-phosphorothioate linkage
  modified_base 2: mod_base = OTHER; note = 2'-O-methyladenosine with a 3'-phosphorothioate linkage
  modified_base 3: mod_base = um
  modified_base 4: mod_base = cm
  modified_base 5: mod_base = gm
  modified_base 6: mod_base = gm
  modified_base 7: mod_base = cm
  modified_base 8: mod_base = um
  modified_base 9: mod_base = OTHER; note = 2'-fluoroguanosine
  modified_base 10: mod_base = OTHER; note = 2'-fluorocytidine
  modified_base 11: mod_base = OTHER; note = 2'-fluoroguanosine
  modified_base 12: mod_base = OTHER; note = 2'-O-methyladenosine
  modified_base 13: mod_base = cm
  modified_base 14: mod_base = OTHER; note = 2'-O-methyladenosine
  modified_base 15: mod_base = gm
  modified_base 16: mod_base = OTHER; note = 2'-O-methyladenosine
  modified_base 17: mod_base = um
  modified_base 18: mod_base = cm
  modified_base 19: mod_base = OTHER; note = 2'-O-methylcytidine with a 3'-phosphorothioate linkage
  modified_base 20: mod_base = OTHER; note = 2'-O-methyladenosine with a 3'-phosphorothioate linkage
  modified_base 21: mod_base = OTHER; note = 2'-O-methyladenosine
catcggctgcgacagatccaa

SEQ ID NO: 97 - RNA, 21 nt, synthetic construct
  source 1..21: mol_type = other RNA
  modified_base 1: mod_base = OTHER; note = 2'-O-methylguanosine with a 3'-phosphorothioate linkage
  modified_base 2: mod_base = OTHER; note = 2'-O-methyluridine with a 3'-phosphorothioate linkage
  modified_base 3: mod_base = gm
  modified_base 4: mod_base = gm
  modified_base 5: mod_base = cm
  modified_base 6: mod_base = OTHER; note = 2'-O-methyladenosine
  modified_base 7: mod_base = cm
  modified_base 8: mod_base = OTHER; note = 2'-O-methyladenosine
  modified_base 9: mod_base = OTHER; note = 2'-fluoroguanosine
  modified_base 10: mod_base = OTHER; note = 2'-fluorocytidine
  modified_base 11: mod_base = OTHER; note = 2'-fluoroadenosine
  modified_base 12: mod_base = gm
  modified_base 13: mod_base = cm
  modified_base 14: mod_base = OTHER; note = 2'-O-methyladenosine
  modified_base 15: mod_base = um
  modified_base 16: mod_base = cm
  modified_base 17: mod_base = gm
  modified_base 18: mod_base = gm
  modified_base 19: mod_base = OTHER; note = 2'-O-methylcytidine with a 3'-phosphorothioate linkage
  modified_base 20: mod_base = OTHER; note = 2'-O-methyluridine with a 3'-phosphorothioate linkage
  modified_base 21: mod_base = OTHER; note = 2'-O-methyladenosine
gtggcacagcagcatcggcta

SEQ ID NO: 98 - RNA, 21 nt, synthetic construct
  source 1..21: mol_type = other RNA
  modified_base 1: mod_base = OTHER; note = 2'-O-methylguanosine with a 3'-phosphorothioate linkage
  modified_base 2: mod_base = OTHER; note = 2'-O-methylguanosine with a 3'-phosphorothioate linkage
  modified_base 3: mod_base = cm
  modified_base 4: mod_base = cm
  modified_base 5: mod_base = cm
  modified_base 6: mod_base = um
  modified_base 7: mod_base = cm
  modified_base 8: mod_base = OTHER; note = 2'-O-methyladenosine
  modified_base 9: mod_base = OTHER; note = 2'-fluorocytidine
  modified_base 10: mod_base = OTHER; note = 2'-fluoroadenosine
  modified_base 11: mod_base = OTHER; note = 2'-fluoroguanosine
  modified_base 12: mod_base = gm
  modified_base 13: mod_base = cm
  modified_base 14: mod_base = cm
  modified_base 15: mod_base = OTHER; note = 2'-O-methyladenosine
  modified_base 16: mod_base = cm
  modified_base 17: mod_base = gm
  modified_base 18: mod_base = um
  modified_base 19: mod_base = OTHER; note = 2'-O-methylguanosine with a 3'-phosphorothioate linkage
  modified_base 20: mod_base = OTHER; note = 2'-O-methylcytidine with a 3'-phosphorothioate linkage
  modified_base 21: mod_base = OTHER; note = 2'-O-methyladenosine
ggccctcacaggccacgtgca

SEQ ID NO: 99 - RNA, 21 nt, synthetic construct
  source 1..21: mol_type = other RNA
  modified_base 1: mod_base = OTHER; note = 2'-O-methyladenosine with a 3'-phosphorothioate linkage
  modified_base 2: mod_base = OTHER; note = 2'-O-methyladenosine with a 3'-phosphorothioate linkage
  modified_base 3: mod_base = cm
  modified_base 4: mod_base = um
  modified_base 5: mod_base = um
  modified_base 6: mod_base = cm
  modified_base 7: mod_base = gm
  modified_base 8: mod_base = gm
  modified_base 9: mod_base = OTHER; note = 2'-fluoroguanosine
  modified_base 10: mod_base = OTHER; note = 2'-fluorocytidine
  modified_base 11: mod_base = OTHER; note = 2'-fluoroadenosine
  modified_base 12: mod_base = OTHER; note = 2'-O-methyladenosine
  modified_base 13: mod_base = gm
  modified_base 14: mod_base = cm
  modified_base 15: mod_base = cm
  modified_base 16: mod_base = um
  modified_base 17: mod_base = gm
  modified_base 18: mod_base = um
  modified_base 19: mod_base = OTHER; note = 2'-O-methyluridine with a 3'-phosphorothioate linkage
  modified_base 20: mod_base = OTHER; note = 2'-O-methylguanosine with a 3'-phosphorothioate linkage
  modified_base 21: mod_base = OTHER; note = 2'-O-methyladenosine
aacttcgggcaagcctgttga

SEQ ID NO: 100 - RNA, 21 nt, synthetic construct
  source 1..21: mol_type = other RNA
  modified_base 1: mod_base = OTHER; note = 2'-O-methyluridine with a 3'-phosphorothioate linkage
  modified_base 2: mod_base = OTHER; note = 2'-O-methyladenosine with a 3'-phosphorothioate linkage
  modified_base 3: mod_base = OTHER; note = 2'-O-methyladenosine
  modified_base 4: mod_base = OTHER; note = 2'-O-methyladenosine
  modified_base 5: mod_base = gm
  modified_base 6: mod_base = gm
  modified_base 7: mod_base = cm
  modified_base 8: mod_base = um
  modified_base 9: mod_base = OTHER; note = 2'-fluorocytidine
  modified_base 10: mod_base = OTHER; note = 2'-fluoroadenosine
  modified_base 11: mod_base = OTHER; note = 2'-fluorocytidine
  modified_base 12: mod_base = gm
  modified_base 13: mod_base = cm
  modified_base 14: mod_base = um
  modified_base 15: mod_base = gm
  modified_base 16: mod_base = OTHER; note = 2'-O-methyladenosine
  modified_base 17: mod_base = cm
  modified_base 18: mod_base = OTHER; note = 2'-O-methyladenosine
  modified_base 19: mod_base = OTHER; note = 2'-O-methyladenosine with a 3'-phosphorothioate linkage
  modified_base 20: mod_base = OTHER; note = 2'-O-methylguanosine with a 3'-phosphorothioate linkage
  modified_base 21: mod_base = OTHER; note = 2'-O-methyladenosine
taaaggctcacgctgacaaga

SEQ ID NO: 101 - RNA, 21 nt, synthetic construct
  source 1..21: mol_type = other RNA
  modified_base 1: mod_base = OTHER; note = 2'-O-methyluridine with a 3'-phosphorothioate linkage
  modified_base 2: mod_base = OTHER; note = 2'-O-methyluridine with a 3'-phosphorothioate linkage
  modified_base 3: mod_base = cm
  modified_base 4: mod_base = gm
  modified_base 5: mod_base = gm
  modified_base 6: mod_base = gm
  modified_base 7: mod_base = cm
  modified_base 8: mod_base = OTHER; note = 2'-O-methyladenosine
  modified_base 9: mod_base = OTHER; note = 2'-fluoroadenosine
  modified_base 10: mod_base = OTHER; note = 2'-fluoroguanosine
  modified_base 11: mod_base = OTHER; note = 2'-fluorocytidine
  modified_base 12: mod_base = cm
  modified_base 13: mod_base = um
  modified_base 14: mod_base = gm
  modified_base 15: mod_base = um
  modified_base 16: mod_base = um
  modified_base 17: mod_base = gm
  modified_base 18: mod_base = gm
  modified_base 19: mod_base = OTHER; note = 2'-O-methyladenosine with a 3'-phosphorothioate linkage
  modified_base 20: mod_base = OTHER; note = 2'-O-methylguanosine with a 3'-phosphorothioate linkage
  modified_base 21: mod_base = OTHER; note = 2'-O-methyladenosine
ttcgggcaagcctgttggaga

SEQ ID NO: 102 - RNA, 21 nt, synthetic construct
  source 1..21: mol_type = other RNA
  modified_base 1: mod_base = OTHER; note = 2'-O-methyladenosine with a 3'-phosphorothioate linkage
  modified_base 2: mod_base = OTHER; note = 2'-O-methylguanosine with a 3'-phosphorothioate linkage
  modified_base 3: mod_base = cm
  modified_base 4: mod_base = OTHER; note = 2'-O-methyladenosine
  modified_base 5: mod_base = um
  modified_base 6: mod_base = cm
  modified_base 7: mod_base = gm
  modified_base 8: mod_base = gm
  modified_base 9: mod_base = OTHER; note = 2'-fluorocytidine
  modified_base 10: mod_base = OTHER; note = 2'-fluorouridine
  modified_base 11: mod_base = OTHER; note = 2'-fluoroguanosine
  modified_base 12: mod_base = cm
  modified_base 13: mod_base = gm
  modified_base 14: mod_base = OTHER; note = 2'-O-methyladenosine
  modified_base 15: mod_base = cm
  modified_base 16: mod_base = OTHER; note = 2'-O-methyladenosine
  modified_base 17: mod_base = gm
  modified_base 18: mod_base = OTHER; note = 2'-O-methyladenosine
  modified_base 19: mod_base = OTHER; note = 2'-O-methyluridine with a 3'-phosphorothioate linkage
  modified_base 20: mod_base = OTHER; note = 2'-O-methylcytidine with a 3'-phosphorothioate linkage
  modified_base 21: mod_base = OTHER; note = 2'-O-methyladenosine
agcatcggctgcgacagatca

SEQ ID NO: 103 - RNA, 21 nt, synthetic construct
  source 1..21: mol_type = other RNA
  modified_base 1: mod_base = OTHER; note = 2'-O-methyladenosine with a 3'-phosphorothioate linkage
  modified_base 2: mod_base = OTHER; note = 2'-O-methyluridine with a 3'-phosphorothioate linkage
  modified_base 3: mod_base = cm
  modified_base 4: mod_base = um
  modified_base 5: mod_base = gm
  modified_base 6: mod_base = cm
  modified_base 7: mod_base = cm
  modified_base 8: mod_base = um
  modified_base 9: mod_base = OTHER; note = 2'-fluoroguanosine
  modified_base 10: mod_base = OTHER; note = 2'-fluoroguanosine
  modified_base 11: mod_base = OTHER; note = 2'-fluoroadenosine
  modified_base 12: mod_base = um
  modified_base 13: mod_base = gm
  modified_base 14: mod_base = gm
  modified_base 15: mod_base = OTHER; note = 2'-O-methyladenosine
  modified_base 16: mod_base = OTHER; note = 2'-O-methyladenosine
  modified_base 17: mod_base = cm
  modified_base 18: mod_base = um
  modified_base 19: mod_base = OTHER; note = 2'-O-methylguanosine with a 3'-phosphorothioate linkage
  modified_base 20: mod_base = OTHER; note = 2'-O-methyladenosine with a 3'-phosphorothioate linkage
  modified_base 21: mod_base = OTHER; note = 2'-O-methyladenosine
atctgcctggatggaactgaa

SEQ ID NO: 104 - RNA, 21 nt, synthetic construct
  source 1..21: mol_type = other RNA
  modified_base 1: mod_base = OTHER; note = 2'-O-methylguanosine with a 3'-phosphorothioate linkage
  modified_base 2: mod_base = OTHER; note = 2'-O-methylcytidine with a 3'-phosphorothioate linkage
  modified_base 3: mod_base = um
  modified_base 4: mod_base = cm
  modified_base 5: mod_base = OTHER; note = 2'-O-methyladenosine
  modified_base 6: mod_base = cm
  modified_base 7: mod_base = gm
  modified_base 8: mod_base = cm
  modified_base 9: mod_base = OTHER; note = 2'-fluorouridine
  modified_base 10: mod_base = OTHER; note = 2'-fluoroguanosine
  modified_base 11: mod_base = OTHER; note = 2'-fluoroadenosine
  modified_base 12: mod_base = cm
  modified_base 13: mod_base = OTHER; note = 2'-O-methyladenosine
  modified_base 14: mod_base = OTHER; note = 2'-O-methyladenosine
  modified_base 15: mod_base = gm
  modified_base 16: mod_base = cm
  modified_base 17: mod_base = OTHER; note = 2'-O-methyladenosine
  modified_base 18: mod_base = gm
  modified_base 19: mod_base = OTHER; note = 2'-O-methyladenosine with a 3'-phosphorothioate linkage
  modified_base 20: mod_base = OTHER; note = 2'-O-methylguanosine with a 3'-phosphorothioate linkage
  modified_base 21: mod_base = OTHER; note = 2'-O-methyladenosine
gctcacgctgacaagcagaga

SEQ ID NO: 105 - RNA, 21 nt, synthetic construct
  source 1..21: mol_type = other RNA
  modified_base 1: mod_base = OTHER; note = 2'-O-methyladenosine with a 3'-phosphorothioate linkage
  modified_base 2: mod_base = OTHER; note = 2'-O-methylguanosine with a 3'-phosphorothioate linkage
  modified_base 3: mod_base = OTHER; note = 2'-O-methyladenosine
  modified_base 4: mod_base = um
  modified_base 5: mod_base = gm
  modified_base 6: mod_base = gm
  modified_base 7: mod_base = OTHER; note = 2'-O-methyladenosine
  modified_base 8: mod_base = gm
  modified_base 9: mod_base = OTHER; note = 2'-fluoroguanosine
  modified_base 10: mod_base = OTHER; note = 2'-fluoroadenosine
  modified_base 11: mod_base = OTHER; note = 2'-fluoroguanosine
  modified_base 12: mod_base = gm
  modified_base 13: mod_base = OTHER; note = 2'-O-methyladenosine
  modified_base 14: mod_base = um
  modified_base 15: mod_base = OTHER; note = 2'-O-methyladenosine
  modified_base 16: mod_base = um
  modified_base 17: mod_base = um
  modified_base 18: mod_base = cm
  modified_base 19: mod_base = OTHER; note = 2'-O-methyluridine with a 3'-phosphorothioate linkage
  modified_base 20: mod_base = OTHER; note = 2'-O-methylguanosine with a 3'-phosphorothioate linkage
  modified_base 21: mod_base = OTHER; note = 2'-O-methyladenosine
agatggaggaggatattctga

SEQ ID NO: 106 - RNA, 21 nt, synthetic construct
  source 1..21: mol_type = other RNA
  modified_base 1: mod_base = OTHER; note = 2'-O-methylguanosine with a 3'-phosphorothioate linkage
  modified_base 2: mod_base = OTHER; note = 2'-O-methylcytidine with a 3'-phosphorothioate linkage
  modified_base 3: mod_base = OTHER; note = 2'-O-methyladenosine
  modified_base 4: mod_base = cm
  modified_base 5: mod_base = OTHER; note = 2'-O-methyladenosine
  modified_base 6: mod_base = gm
  modified_base 7: mod_base = cm
  modified_base 8: mod_base = OTHER; note = 2'-O-methyladenosine
  modified_base 9: mod_base = OTHER; note = 2'-fluoroguanosine
  modified_base 10: mod_base = OTHER; note = 2'-fluorocytidine
  modified_base 11: mod_base = OTHER; note = 2'-fluoroadenosine
  modified_base 12: mod_base = um
  modified_base 13: mod_base = cm
  modified_base 14: mod_base = gm
  modified_base 15: mod_base = gm
  modified_base 16: mod_base = cm
  modified_base 17: mod_base = um
  modified_base 18: mod_base = gm
  modified_base 19: mod_base = OTHER; note = 2'-O-methylcytidine with a 3'-phosphorothioate linkage
  modified_base 20: mod_base = OTHER; note = 2'-O-methylguanosine with a 3'-phosphorothioate linkage
  modified_base 21: mod_base = OTHER; note = 2'-O-methyladenosine
gcacagcagcatcggctgcga

SEQ ID NO: 107 - RNA, 21 nt, synthetic construct
  source 1..21: mol_type = other RNA
  modified_base 1: mod_base = OTHER; note = 2'-O-methyladenosine with a 3'-phosphorothioate linkage
  modified_base 2: mod_base = OTHER; note = 2'-O-methylguanosine with a 3'-phosphorothioate linkage
  modified_base 3: mod_base = gm
  modified_base 4: mod_base = OTHER; note = 2'-O-methyladenosine
  modified_base 5: mod_base = OTHER; note = 2'-O-methyladenosine
  modified_base 6: mod_base = cm
  modified_base 7: mod_base = OTHER; note = 2'-O-methyladenosine
  modified_base 8: mod_base = gm
  modified_base 9: mod_base = OTHER; note = 2'-fluorocytidine
  modified_base 10: mod_base = OTHER; note = 2'-fluorocytidine
  modified_base 11: mod_base = OTHER; note = 2'-fluorouridine
  modified_base 12: mod_base = gm
  modified_base 13: mod_base = gm
  modified_base 14: mod_base = gm
  modified_base 15: mod_base = um
  modified_base 16: mod_base = cm
  modified_base 17: mod_base = um
  modified_base 18: mod_base = cm
  modified_base 19: mod_base = OTHER; note = 2'-O-methyluridine with a 3'-phosphorothioate linkage
  modified_base 20: mod_base = OTHER; note = 2'-O-methyladenosine with a 3'-phosphorothioate linkage
  modified_base 21: mod_base = OTHER; note = 2'-O-methyladenosine
aggaacagcctgggtctctaa

SEQ ID NO: 108 - RNA, 21 nt, synthetic construct
  source 1..21: mol_type = other RNA
  modified_base 1: mod_base = OTHER; note = 2'-O-methylguanosine with a 3'-phosphorothioate linkage
  modified_base 2: mod_base = OTHER; note = 2'-O-methylguanosine with a 3'-phosphorothioate linkage
  modified_base 3: mod_base = OTHER; note = 2'-O-methyladenosine
  modified_base 4: mod_base = gm
  modified_base 5: mod_base = OTHER; note = 2'-O-methyladenosine
  modified_base 6: mod_base = um
  modified_base 7: mod_base = gm
  modified_base 8: mod_base = gm
  modified_base 9: mod_base = OTHER; note = 2'-fluorouridine
  modified_base 10: mod_base = OTHER; note = 2'-fluoroguanosine
  modified_base 11: mod_base = OTHER; note = 2'-fluoroguanosine
  modified_base 12: mod_base = cm
  modified_base 13: mod_base = OTHER; note = 2'-O-methyladenosine
  modified_base 14: mod_base = cm
  modified_base 15: mod_base = OTHER; note = 2'-O-methyladenosine
  modified_base 16: mod_base = gm
  modified_base 17: mod_base = cm
  modified_base 18: mod_base = OTHER; note = 2'-O-methyladenosine
  modified_base 19: mod_base = OTHER; note = 2'-O-methylguanosine with a 3'-phosphorothioate linkage
  modified_base 20: mod_base = OTHER; note = 2'-O-methylcytidine with a 3'-phosphorothioate linkage
  modified_base 21: mod_base = OTHER; note = 2'-O-methyladenosine
ggagatggtggcacagcagca

SEQ ID NO: 109 - RNA, 21 nt, synthetic construct
  source 1..21: mol_type = other RNA
  modified_base 1: mod_base = OTHER; note = 2'-O-methylguanosine with a 3'-phosphorothioate linkage
  modified_base 2: mod_base = OTHER; note = 2'-O-methylcytidine with a 3'-phosphorothioate linkage
  modified_base 3: mod_base = OTHER; note = 2'-O-methyladenosine
  modified_base 4: mod_base = gm
  modified_base 5: mod_base = cm
  modified_base 6: mod_base = OTHER; note = 2'-O-methyladenosine
  modified_base 7: mod_base = um
  modified_base 8: mod_base = cm
  modified_base 9: mod_base = OTHER; note = 2'-fluoroguanosine
  modified_base 10: mod_base = OTHER; note = 2'-fluoroguanosine
  modified_base 11: mod_base = OTHER; note = 2'-fluorocytidine
  modified_base 12: mod_base = um
  modified_base 13: mod_base = gm
  modified_base 14: mod_base = cm
  modified_base 15: mod_base = gm
  modified_base 16: mod_base = OTHER; note = 2'-O-methyladenosine
  modified_base 17: mod_base = cm
  modified_base 18: mod_base = OTHER; note = 2'-O-methyladenosine
  modified_base 19: mod_base = OTHER; note = 2'-O-methylguanosine with a 3'-phosphorothioate linkage
  modified_base 20: mod_base = OTHER; note = 2'-O-methyladenosine with a 3'-phosphorothioate linkage
  modified_base 21: mod_base = OTHER; note = 2'-O-methyladenosine
gcagcatcggctgcgacagaa

SEQ ID NO: 110 - RNA, 21 nt, synthetic construct
  source 1..21: mol_type = other RNA
  modified_base 1: mod_base = OTHER; note = 2'-O-methyladenosine with a 3'-phosphorothioate linkage
  modified_base 2: mod_base = OTHER; note = 2'-O-methyladenosine with a 3'-phosphorothioate linkage
  modified_base 3: mod_base = um
  modified_base 4: mod_base = um
  modified_base 5: mod_base = um
  modified_base 6: mod_base = gm
  modified_base 7: mod_base = OTHER; note = 2'-O-methyladenosine
  modified_base 8: mod_base = gm
  modified_base 9: mod_base = OTHER; note = 2'-fluoroguanosine
  modified_base 10: mod_base = OTHER; note = 2'-fluorouridine
  modified_base 11: mod_base = OTHER; note = 2'-fluorocytidine
  modified_base 12: mod_base = um
  modified_base 13: mod_base = um
  modified_base 14: mod_base = OTHER; note = 2'-O-methyladenosine
  modified_base 15: mod_base = OTHER; note = 2'-O-methyladenosine
  modified_base 16: mod_base = OTHER; note = 2'-O-methyladenosine
  modified_base 17: mod_base = gm
  modified_base 18: mod_base = gm
  modified_base 19: mod_base = OTHER; note = 2'-O-methylcytidine with a 3'-phosphorothioate linkage
  modified_base 20: mod_base = OTHER; note = 2'-O-methyluridine with a 3'-phosphorothioate linkage
  modified_base 21: mod_base = OTHER; note = 2'-O-methyladenosine
aatttgaggtcttaaaggcta

SEQ ID NO: 111 - RNA, 21 nt, synthetic construct
  source 1..21: mol_type = other RNA
  modified_base 1: mod_base = OTHER; note = 2'-O-methyladenosine with a 3'-phosphorothioate linkage
  modified_base 2: mod_base = OTHER; note = 2'-O-methyladenosine with a 3'-phosphorothioate linkage
  modified_base 3: mod_base = gm
  modified_base 4: mod_base = um
  modified_base 5: mod_base = cm
  modified_base 6: mod_base = cm
  modified_base 7: mod_base = OTHER; note = 2'-O-methyladenosine
  modified_base 8: mod_base = gm
  modified_base 9: mod_base = OTHER; note = 2'-fluorocytidine
  modified_base 10: mod_base = OTHER; note = 2'-fluorouridine
  modified_base 11: mod_base = OTHER; note = 2'-fluoroguanosine
  modified_base 12: mod_base = OTHER; note = 2'-O-methyladenosine
  modified_base 13: mod_base = gm
  modified_base 14: mod_base = gm
  modified_base 15: mod_base = OTHER; note = 2'-O-methyladenosine
  modified_base 16: mod_base = gm
  modified_base 17: mod_base = cm
  modified_base 18: mod_base = gm
  modified_base 19: mod_base = OTHER; note = 2'-O-methylcytidine with a 3'-phosphorothioate linkage
  modified_base 20: mod_base = OTHER; note = 2'-O-methylcytidine with a 3'-phosphorothioate linkage
  modified_base 21: mod_base = OTHER; note = 2'-O-methyladenosine
aagtccagctgaggagcgcca

SEQ ID NO: 112 - RNA, 21 nt, synthetic construct
  source 1..21: mol_type = other RNA
  modified_base 1: mod_base = OTHER; note = 2'-O-methylguanosine with a 3'-phosphorothioate linkage
  modified_base 2: mod_base = OTHER; note = 2'-O-methyladenosine with a 3'-phosphorothioate linkage
  modified_base 3: mod_base = gm
  modified_base 4: mod_base = gm
  modified_base 5: mod_base = um
  modified_base 6: mod_base = cm
  modified_base 7: mod_base = um
  modified_base 8: mod_base = um
  modified_base 9: mod_base = OTHER; note = 2'-fluoroadenosine
  modified_base 10: mod_base = OTHER; note = 2'-fluoroadenosine
  modified_base 11: mod_base = OTHER; note = 2'-fluoroadenosine
  modified_base 12: mod_base = gm
  modified_base 13: mod_base = gm
  modified_base 14: mod_base = cm
  modified_base 15: mod_base = um
  modified_base 16: mod_base = cm
  modified_base 17: mod_base = OTHER; note = 2'-O-methyladenosine
  modified_base 18: mod_base = cm
  modified_base 19: mod_base = OTHER; note = 2'-O-methylguanosine with a 3'-phosphorothioate linkage
  modified_base 20: mod_base = OTHER; note = 2'-O-methylcytidine with a 3'-phosphorothioate linkage
  modified_base 21: mod_base = OTHER; note = 2'-O-methyladenosine
gaggtcttaaaggctcacgca

SEQ ID NO: 113 - RNA, 23 nt, synthetic construct
  source 1..23: mol_type = other RNA
  modified_base 1: mod_base = OTHER; note = 2'-O-methyluridine with a 3'-phosphorothioate linkage and a 5'-phosphate substitution
  modified_base 2: mod_base = OTHER; note = 2'-fluorouridine with a 3'-phosphorothioate linkage
  modified_base 3: mod_base = cm
  modified_base 4: mod_base = um
  modified_base 5: mod_base = OTHER; note = 2'-fluorocytidine
  modified_base 6: mod_base = cm
  modified_base 7: mod_base = OTHER; note = 2'-fluoroadenosine
  modified_base 8: mod_base = OTHER; note = 2'-O-methyladenosine
  modified_base 9: mod_base = cm
  modified_base 10: mod_base = OTHER; note = 2'-O-methyladenosine
  modified_base 11: mod_base = gm
  modified_base 12: mod_base = gm
  modified_base 13: mod_base = cm
  modified_base 14: mod_base = OTHER; note = 2'-fluorouridine
  modified_base 15: mod_base = um
  modified_base 16: mod_base = OTHER; note = 2'-fluoroguanosine
  modified_base 17: mod_base = cm
  modified_base 18: mod_base = cm
  modified_base 19: mod_base = cm
  modified_base 20: mod_base = gm
  modified_base 21: mod_base = OTHER; note = 2'-O-methyladenosine with a 3'-phosphorothioate linkage
  modified_base 22: mod_base = OTHER; note = 2'-O-methyladenosine with a 3'-phosphorothioate linkage
  modified_base 23: mod_base = gm
ttctccaacaggcttgcccgaag

SEQ ID NO: 114 - RNA, 23 nt, synthetic construct
  source 1..23: mol_type = other RNA
  modified_base 1: mod_base = OTHER; note = 2'-O-methyluridine with a 3'-phosphorothioate linkage and a 5'-phosphate substitution
  modified_base 2: mod_base = OTHER; note = 2'-fluorocytidine with a 3'-phosphorothioate linkage
  modified_base 3: mod_base = OTHER; note = 2'-O-methyladenosine
  modified_base 4: mod_base = gm
  modified_base 5: mod_base = OTHER; note = 2'-fluorouridine
  modified_base 6: mod_base = um
  modified_base 7: mod_base = OTHER; note = 2'-fluorocytidine
  modified_base 8: mod_base = cm
  modified_base 9: mod_base = OTHER; note = 2'-O-methyladenosine
  modified_base 10: mod_base = um
  modified_base 11: mod_base = cm
  modified_base 12: mod_base = cm
  modified_base 13: mod_base = OTHER; note = 2'-O-methyladenosine
  modified_base 14: mod_base = OTHER; note = 2'-fluoroguanosine
  modified_base 15: mod_base = gm
  modified_base 16: mod_base = OTHER; note = 2'-fluorocytidine
  modified_base 17: mod_base = OTHER; note = 2'-O-methyladenosine
  modified_base 18: mod_base = gm
  modified_base 19: mod_base = OTHER; note = 2'-O-methyladenosine
  modified_base 20: mod_base = um
  modified_base 21: mod_base = OTHER; note = 2'-O-methyluridine with a 3'-phosphorothioate linkage
  modified_base 22: mod_base = OTHER; note = 2'-O-methylcytidine with a 3'-phosphorothioate linkage
  modified_base 23: mod_base = OTHER; note = 2'-O-methyladenosine
tcagttccatccaggcagattca

SEQ ID NO: 115 - RNA, 23 nt, synthetic construct
  source 1..23: mol_type = other RNA
  modified_base 1: mod_base = OTHER; note = 2'-O-methyluridine with a 3'-phosphorothioate linkage and a 5'-phosphate substitution
  modified_base 2: mod_base = OTHER; note = 2'-fluoroguanosine with a 3'-phosphorothioate linkage
  modified_base 3: mod_base = gm
  modified_base 4: mod_base = um
  modified_base 5: mod_base = OTHER; note = 2'-fluorocytidine
  modified_base 6: mod_base = cm
  modified_base 7: mod_base = OTHER; note = 2'-fluorouridine
  modified_base 8: mod_base = cm
  modified_base 9: mod_base = OTHER; note = 2'-O-methyladenosine
  modified_base 10: mod_base = gm
  modified_base 11: mod_base = um
  modified_base 12: mod_base = um
  modified_base 13: mod_base = cm
  modified_base 14: mod_base = OTHER; note = 2'-fluorocytidine
  modified_base 15: mod_base = OTHER; note = 2'-O-methyladenosine
  modified_base 16: mod_base = OTHER; note = 2'-fluorouridine
  modified_base 17: mod_base = cm
  modified_base 18: mod_base = cm
  modified_base 19: mod_base = OTHER; note = 2'-O-methyladenosine
  modified_base 20: mod_base = gm
  modified_base 21: mod_base = OTHER; note = 2'-O-methylguanosine with a 3'-phosphorothioate linkage
  modified_base 22: mod_base = OTHER; note = 2'-O-methylcytidine with a 3'-phosphorothioate linkage
  modified_base 23: mod_base = OTHER; note = 2'-O-methyladenosine
tggtcctcagttccatccaggca

SEQ ID NO: 116 - RNA, 23 nt, synthetic construct
  source 1..23: mol_type = other RNA
  modified_base 1: mod_base = OTHER; note = 2'-O-methyluridine with a 3'-phosphorothioate linkage and a 5'-phosphate substitution
  modified_base 2: mod_base = OTHER; note = 2'-fluoroadenosine with a 3'-phosphorothioate linkage
  modified_base 3: mod_base = um
  modified_base 4: mod_base = gm
  modified_base 5: mod_base = OTHER; note = 2'-fluorocytidine
  modified_base 6: mod_base = cm
  modified_base 7: mod_base = OTHER; note = 2'-fluoroadenosine
  modified_base 8: mod_base = cm
  modified_base 9: mod_base = gm
  modified_base 10: mod_base = OTHER; note = 2'-O-methyladenosine
  modified_base 11: mod_base = cm
  modified_base 12: mod_base = um
  modified_base 13: mod_base = cm
  modified_base 14: mod_base = OTHER; note = 2'-fluorouridine
  modified_base 15: mod_base = gm
  modified_base 16: mod_base = OTHER; note = 2'-fluorocytidine
  modified_base 17: mod_base = um
  modified_base 18: mod_base = um
  modified_base 19: mod_base = um
  modified_base 20: mod_base = OTHER; note = 2'-O-methyladenosine
  modified_base 21: mod_base = OTHER; note = 2'-O-methyladenosine with a 3'-phosphorothioate linkage
  modified_base 22: mod_base = OTHER; note = 2'-O-methyluridine with a 3'-phosphorothioate linkage
  modified_base 23: mod_base = gm
tatgccacgactctgctttaatg

SEQ ID NO: 117 - RNA, 23 nt, synthetic construct
  source 1..23: mol_type = other RNA
  modified_base 1: mod_base = OTHER; note = 2'-O-methyluridine with a 3'-phosphorothioate linkage and a 5'-phosphate substitution
  modified_base 2: mod_base = OTHER; note = 2'-fluorouridine with a 3'-phosphorothioate linkage
  modified_base 3: mod_base = cm
  modified_base 4: mod_base = um
  modified_base 5: mod_base = OTHER; note = 2'-fluorocytidine
  modified_base 6: mod_base = um
  modified_base 7: mod_base = OTHER; note = 2'-fluorocytidine
  modified_base 8: mod_base = cm
  modified_base 9: mod_base = um
  modified_base 10: mod_base = gm
  modified_base 11: mod_base = gm
  modified_base 12: mod_base = OTHER; note = 2'-O-methyladenosine
  modified_base 13: mod_base = um
  modified_base 14: mod_base = OTHER; note = 2'-fluorocytidine
  modified_base 15: mod_base = um
  modified_base 16: mod_base = OTHER; note = 2'-fluoroguanosine
  modified_base 17: mod_base = um
  modified_base 18: mod_base = cm
  modified_base 19: mod_base = gm
  modified_base 20: mod_base = cm
  modified_base 21: mod_base = OTHER; note = 2'-O-methyladenosine with a 3'-phosphorothioate linkage
  modified_base 22: mod_base = OTHER; note = 2'-O-methylguanosine with a 3'-phosphorothioate linkage
  modified_base 23: mod_base = cm
ttctctcctggatctgtcgcagc

SEQ ID NO: 118 - RNA, 23 nt, synthetic construct
  source 1..23: mol_type = other RNA
  modified_base 1: mod_base = OTHER; note = 2'-O-methyluridine with a 3'-phosphorothioate linkage and a 5'-phosphate substitution
  modified_base 2: mod_base = OTHER; note = 2'-fluoroguanosine with a 3'-phosphorothioate linkage
  modified_base 3: mod_base = um
  modified_base 4: mod_base = um
  modified_base 5: mod_base = OTHER; note = 2'-fluorocytidine
  modified_base 6: mod_base = cm
  modified_base 7: mod_base = OTHER; note = 2'-fluoroadenosine
  modified_base 8: mod_base = um
  modified_base 9: mod_base = cm
  modified_base 10: mod_base = cm
  modified_base 11: mod_base = OTHER; note = 2'-O-methyladenosine
  modified_base 12: mod_base = gm
  modified_base 13: mod_base = gm
  modified_base 14: mod_base = OTHER; note = 2'-fluorocytidine
  modified_base 15: mod_base = OTHER; note = 2'-O-methyladenosine
  modified_base 16: mod_base = OTHER; note = 2'-fluoroguanosine
  modified_base 17: mod_base = OTHER; note = 2'-O-methyladenosine
  modified_base 18: mod_base = um
  modified_base 19: mod_base = um
  modified_base 20: mod_base = cm
  modified_base 21: mod_base = OTHER; note = 2'-O-methyladenosine with a 3'-phosphorothioate linkage
  modified_base 22: mod_base = OTHER; note = 2'-O-methylguanosine with a 3'-phosphorothioate linkage
  modified_base 23: mod_base = gm
tgttccatccaggcagattcagg

SEQ ID NO: 119 - RNA, 23 nt, synthetic construct
  source 1..23: mol_type = other RNA
  modified_base 1: mod_base = OTHER; note = 2'-O-methyluridine with a 3'-phosphorothioate linkage and a 5'-phosphate substitution
  modified_base 2: mod_base = OTHER; note = 2'-fluorouridine with a 3'-phosphorothioate linkage
  modified_base 3: mod_base = cm
  modified_base 4: mod_base = cm
  modified_base 5: mod_base = OTHER; note = 2'-fluorocytidine
  modified_base 6: mod_base = OTHER; note = 2'-O-methyladenosine
  modified_base 7: mod_base = OTHER; note = 2'-fluoroguanosine
  modified_base 8: mod_base = um
  modified_base 9: mod_base = gm
  modified_base 10: mod_base = OTHER; note = 2'-O-methyladenosine
  modified_base 11: mod_base = OTHER; note = 2'-O-methyladenosine
  modified_base 12: mod_base = cm
  modified_base 13: mod_base = OTHER; note = 2'-O-methyladenosine
  modified_base 14: mod_base = OTHER; note = 2'-fluoroguanosine
  modified_base 15: mod_base = gm
  modified_base 16: mod_base = OTHER; note = 2'-fluorocytidine
  modified_base 17: mod_base = OTHER; note = 2'-O-methyladenosine
  modified_base 18: mod_base = gm
  modified_base 19: mod_base = cm
  modified_base 20: mod_base = um
  modified_base 21: mod_base = OTHER; note = 2'-O-methylcytidine with a 3'-phosphorothioate linkage
  modified_base 22: mod_base = OTHER; note = 2'-O-methylcytidine with a 3'-phosphorothioate linkage
  modified_base 23: mod_base = um
ttcccagtgaacaggcagctcct

SEQ ID NO: 120 - RNA, 23 nt, synthetic construct
  source 1..23: mol_type = other RNA
  modified_base 1: mod_base = OTHER; note = 2'-O-methyluridine with a 3'-phosphorothioate linkage and a 5'-phosphate substitution
  modified_base 2: mod_base = OTHER; note = 2'-fluoroadenosine with a 3'-phosphorothioate linkage
  modified_base 3: mod_base = gm
  modified_base 4: mod_base = cm
  modified_base 5: mod_base = OTHER; note = 2'-fluoroguanosine
  modified_base 6: mod_base = um
  modified_base 7: mod_base = OTHER; note = 2'-fluoroguanosine
  modified_base 8: mod_base = OTHER; note = 2'-O-methyladenosine
  modified_base 9: mod_base = gm
  modified_base 10: mod_base = cm
  modified_base 11: mod_base = cm
  modified_base 12: mod_base = um
  modified_base 13: mod_base = um
  modified_base 14: mod_base = OTHER; note = 2'-fluorouridine
  modified_base 15: mod_base = OTHER; note = 2'-O-methyladenosine
  modified_base 16: mod_base = OTHER; note = 2'-fluoroadenosine
  modified_base 17: mod_base = gm
  modified_base 18: mod_base = OTHER; note = 2'-O-methyladenosine
  modified_base 19: mod_base = cm
  modified_base 20: mod_base = cm
  modified_base 21: mod_base = OTHER; note = 2'-O-methyluridine with a 3'-phosphorothioate linkage
  modified_base 22: mod_base = OTHER; note = 2'-O-methylcytidine with a 3'-phosphorothioate linkage
  modified_base 23: mod_base = OTHER; note = 2'-O-methyladenosine
tagcgtgagcctttaagacctca

SEQ ID NO: 121 - RNA, 23 nt, synthetic construct
  source 1..23: mol_type = other RNA
  modified_base 1: mod_base = OTHER; note = 2'-O-methyluridine with a 3'-phosphorothioate linkage and a 5'-phosphate substitution
  modified_base 2: mod_base = OTHER; note = 2'-fluoroguanosine with a 3'-phosphorothioate linkage
  modified_base 3: mod_base = cm
  modified_base 4: mod_base = cm
  modified_base 5: mod_base = OTHER; note = 2'-fluorocytidine
  modified_base 6: mod_base = um
  modified_base 7: mod_base = OTHER; note = 2'-fluoroguanosine
  modified_base 8: mod_base = gm
  modified_base 9: mod_base = cm
  modified_base 10: mod_base = um
  modified_base 11: mod_base = gm
  modified_base 12: mod_base = OTHER; note = 2'-O-methyladenosine
  modified_base 13: mod_base = um
  modified_base 14: mod_base = OTHER; note = 2'-fluorocytidine
  modified_base 15: mod_base = cm
  modified_base 16: mod_base = OTHER; note = 2'-fluorocytidine
  modified_base 17: mod_base = OTHER; note = 2'-O-methyladenosine
  modified_base 18: mod_base = gm
  modified_base 19: mod_base = um
  modified_base 20: mod_base = gm
  modified_base 21: mod_base = OTHER; note = 2'-O-methyladenosine with a 3'-phosphorothioate linkage
  modified_base 22: mod_base = OTHER; note = 2'-O-methyladenosine with a 3'-phosphorothioate linkage
  modified_base 23: mod_base = cm
tgccctggctgatcccagtgaac

SEQ ID NO: 122 - RNA, 23 nt, synthetic construct
  source 1..23: mol_type = other RNA
  modified_base 1: mod_base = OTHER; note = 2'-O-methyluridine with a 3'-phosphorothioate linkage and a 5'-phosphate substitution
  modified_base 2: mod_base = OTHER; note = 2'-fluorocytidine with a 3'-phosphorothioate linkage
  modified_base 3: mod_base = cm
  modified_base 4: mod_base = OTHER; note = 2'-O-methyladenosine
  modified_base 5: mod_base = OTHER; note = 2'-fluorocytidine
  modified_base 6: mod_base = gm
  modified_base 7: mod_base = OTHER; note = 2'-fluoroadenosine
  modified_base 8: mod_base = cm
  modified_base 9: mod_base = um
  modified_base 10: mod_base = cm
  modified_base 11: mod_base = um
  modified_base 12: mod_base = gm
  modified_base 13: mod_base = cm
  modified_base 14: mod_base = OTHER; note = 2'-fluorouridine
  modified_base 15: mod_base = um
  modified_base 16: mod_base = OTHER; note = 2'-fluorouridine
  modified_base 17: mod_base = OTHER; note = 2'-O-methyladenosine
  modified_base 18: mod_base = OTHER; note = 2'-O-methyladenosine
  modified_base 19: mod_base = um
  modified_base 20: mod_base = gm
  modified_base 21: mod_base = OTHER; note = 2'-O-methyladenosine with a 3'-phosphorothioate linkage
  modified_base 22: mod_base = OTHER; note = 2'-O-methylguanosine with a 3'-phosphorothioate linkage
  modified_base 23: mod_base = gm
tccacgactctgctttaatgagg

SEQ ID NO: 123 - RNA, 23 nt, synthetic construct
  source 1..23: mol_type = other RNA
  modified_base 1: mod_base = OTHER; note = 2'-O-methyluridine with a 3'-phosphorothioate linkage and a 5'-phosphate substitution
  modified_base 2: mod_base = OTHER; note = 2'-fluorocytidine with a 3'-phosphorothioate linkage
  modified_base 3: mod_base = OTHER; note = 2'-O-methyladenosine
  modified_base 4: mod_base = um
  modified_base 5: mod_base = OTHER; note = 2'-fluoroadenosine
  modified_base 6: mod_base = gm
  modified_base 7: mod_base = OTHER; note = 2'-fluoroadenosine
  modified_base 8: mod_base = gm
  modified_base 9: mod_base = OTHER; note = 2'-O-methyladenosine
  modified_base 10: mod_base = cm
  modified_base 11: mod_base = cm
  modified_base 12: mod_base = cm
  modified_base 13: mod_base = OTHER; note = 2'-O-methyladenosine
  modified_base 14: mod_base = OTHER; note = 2'-fluoroguanosine
  modified_base 15: mod_base = gm
  modified_base 16: mod_base = OTHER; note = 2'-fluorocytidine
  modified_base 17: mod_base = um
  modified_base 18: mod_base = gm
  modified_base 19: mod_base = um
  modified_base 20: mod_base = um
  modified_base 21: mod_base = OTHER; note = 2'-O-methylcytidine with a 3'-phosphorothioate linkage
  modified_base 22: mod_base = OTHER; note = 2'-O-methylcytidine with a 3'-phosphorothioate linkage
  modified_base 23: mod_base = um
tcatagagacccaggctgttcct

SEQ ID NO: 124 - RNA, 23 nt, synthetic construct
  source 1..23: mol_type = other RNA
  modified_base 1: mod_base = OTHER; note = 2'-O-methyluridine with a 3'-phosphorothioate linkage and a 5'-phosphate substitution
  modified_base 2: mod_base = OTHER; note = 2'-fluorocytidine with a 3'-phosphorothioate linkage
  modified_base 3: mod_base = cm
  modified_base 4: mod_base = cm
  modified_base 5: mod_base = OTHER; note = 2'-fluoroguanosine
  modified_base 6: mod_base = gm
  modified_base 7: mod_base = OTHER; note = 2'-fluorocytidine
  modified_base 8: mod_base = um
  modified_base 9: mod_base = gm
  modified_base 10: mod_base = OTHER; note = 2'-O-methyladenosine
  modified_base 11: mod_base = cm
  modified_base 12: mod_base = cm
  modified_base 13: mod_base = um
  modified_base 14: mod_base = OTHER; note = 2'-fluorocytidine
  modified_base 15: mod_base = cm
  modified_base 16: mod_base = OTHER; note = 2'-fluorouridine
  modified_base 17: mod_base = gm
  modified_base 18: mod_base = cm
  modified_base 19: mod_base = cm
  modified_base 20: mod_base = cm
  modified_base 21: mod_base = OTHER; note = 2'-O-methylcytidine with a 3'-phosphorothioate linkage
  modified_base 22: mod_base = OTHER; note = 2'-O-methyladenosine with a 3'-phosphorothioate linkage
  modified_base 23: mod_base = gm
tcccggctgacctcctgccccag

SEQ ID NO: 125 - RNA, 23 nt, synthetic construct
  source 1..23: mol_type = other RNA
  modified_base 1: mod_base = OTHER; note = 2'-O-methyluridine with a 3'-phosphorothioate linkage and a 5'-phosphate substitution
  modified_base 2: mod_base = OTHER; note = 2'-fluorocytidine with a 3'-phosphorothioate linkage
  modified_base 3: mod_base = OTHER; note = 2'-O-methyladenosine
  modified_base 4: mod_base = gm
  modified_base 5: mod_base = OTHER; note = 2'-fluorocytidine
  modified_base 6: mod_base = um
  modified_base 7: mod_base = OTHER; note = 2'-fluoroguanosine
  modified_base 8: mod_base = gm
  modified_base 9: mod_base = OTHER; note = 2'-O-methyladenosine
  modified_base 10: mod_base = cm
  modified_base 11: mod_base = um
  modified_base 12: mod_base = um
  modified_base 13: mod_base = cm
  modified_base 14: mod_base = OTHER; note = 2'-fluorouridine
  modified_base 15: mod_base = OTHER; note = 2'-O-methyladenosine
  modified_base 16: mod_base = OTHER; note = 2'-fluoroguanosine
  modified_base 17: mod_base = cm
  modified_base 18: mod_base = cm
  modified_base 19: mod_base = gm
  modified_base 20: mod_base = cm
  modified_base 21: mod_base = OTHER; note = 2'-O-methyluridine with a 3'-phosphorothioate linkage
  modified_base 22: mod_base = OTHER; note = 2'-O-methylguanosine with a 3'-phosphorothioate linkage
  modified_base 23: mod_base = cm
tcagctggacttctagccgctgc

SEQ ID NO: 126 - RNA, 23 nt, synthetic construct
  source 1..23: mol_type = other RNA
  modified_base 1: mod_base = OTHER; note = 2'-O-methyluridine with a 3'-phosphorothioate linkage and a 5'-phosphate substitution
  modified_base 2: mod_base = OTHER; note = 2'-fluorouridine with a 3'-phosphorothioate linkage
  modified_base 3: mod_base = gm
  modified_base 4: mod_base = cm
  modified_base 5: mod_base = OTHER; note = 2'-fluorouridine
  modified_base 6: mod_base = gm
  modified_base 7: mod_base = OTHER; note = 2'-fluorocytidine
  modified_base 8: mod_base = um
  modified_base 9: mod_base = gm
  modified_base 10: mod_base = um
  modified_base 11: mod_base = gm
  modified_base 12: mod_base = cm
  modified_base 13: mod_base = cm
  modified_base 14: mod_base = OTHER; note = 2'-fluoroadenosine
  modified_base 15: mod_base = cm
  modified_base 16: mod_base = OTHER; note = 2'-fluorocytidine
  modified_base 17: mod_base = OTHER; note = 2'-O-methyladenosine
  modified_base 18: mod_base = um
  modified_base 19: mod_base = cm
  modified_base 20: mod_base = um
  modified_base 21: mod_base = OTHER; note = 2'-O-methylcytidine with a 3'-phosphorothioate linkage
  modified_base 22: mod_base = OTHER; note = 2'-O-methylcytidine with a 3'-phosphorothioate linkage
  modified_base 23: mod_base = cm
ttgctgctgtgccaccatctccc

SEQ ID NO: 127 - RNA, 23 nt, synthetic construct
  source 1..23: mol_type = other RNA
  modified_base 1: mod_base = OTHER; note = 2'-O-methyluridine with a 3'-phosphorothioate linkage and a 5'-phosphate substitution
  modified_base 2: mod_base = OTHER; note = 2'-fluoroguanosine with a 3'-phosphorothioate linkage
  modified_base 3: mod_base = um
  modified_base 4: mod_base = um
  modified_base 5: mod_base = OTHER; note = 2'-fluorocytidine
  modified_base 6: mod_base = cm
  modified_base 7: mod_base = OTHER; note = 2'-fluorouridine
  modified_base 8: mod_base = gm
  modified_base 9: mod_base = gm
  modified_base 10: mod_base = cm
  modified_base 11: mod_base = cm
  modified_base 12: mod_base = um
  modified_base 13: mod_base = um
  modified_base 14: mod_base = OTHER; note = 2'-fluorouridine
  modified_base 15: mod_base = gm
  modified_base 16: mod_base = OTHER; note = 2'-fluorouridine
  modified_base 17: mod_base = cm
  modified_base 18: mod_base = OTHER; note = 2'-O-methyladenosine
  modified_base 19: mod_base = gm
  modified_base 20: mod_base = cm
  modified_base 21: mod_base = OTHER; note = 2'-O-methylcytidine with a 3'-phosphorothioate linkage
  modified_base 22: mod_base = OTHER; note = 2'-O-methylguanosine with a 3'-phosphorothioate linkage
  modified_base 23: mod_base = um
tgttcctggcctttgtcagccgt

SEQ ID NO: 128 - RNA, 23 nt, synthetic construct
  source 1..23: mol_type = other RNA
  modified_base 1: mod_base = OTHER; note = 2'-O-methyluridine with a 3'-phosphorothioate linkage and a 5'-phosphate substitution
  modified_base 2: mod_base = OTHER; note = 2'-fluorocytidine with a 3'-phosphorothioate linkage
  modified_base 3: mod_base = OTHER; note = 2'-O-methyladenosine
  modified_base 4: mod_base = gm
  modified_base 5: mod_base = OTHER; note = 2'-fluoroguanosine
  modified_base 6: mod_base = cm
  modified_base 7: mod_base = OTHER; note = 2'-fluoroguanosine
  modified_base 8: mod_base = cm
  modified_base 9: mod_base = um
  modified_base 10: mod_base = cm
  modified_base 11: mod_base = cm
  modified_base 12: mod_base = um
  modified_base 13: mod_base = cm
  modified_base 14: mod_base = OTHER; note = 2'-fluoroadenosine
  modified_base 15: mod_base = gm
  modified_base 16: mod_base = OTHER; note = 2'-fluorocytidine
  modified_base 17: mod_base = um
  modified_base 18: mod_base = gm
  modified_base 19: mod_base = gm
  modified_base 20: mod_base = OTHER; note = 2'-O-methyladenosine
  modified_base 21: mod_base = OTHER; note = 2'-O-methylcytidine with a 3'-phosphorothioate linkage
  modified_base 22: mod_base = OTHER; note = 2'-O-methyluridine with a 3'-phosphorothioate linkage
  modified_base 23: mod_base = um
tcaggcgctcctcagctggactt

SEQ ID NO: 129 - RNA, 23 nt, synthetic construct
  source 1..23: mol_type = other RNA
  modified_base 1: mod_base = OTHER; note = 2'-O-methyluridine with a 3'-phosphorothioate linkage and a 5'-phosphate substitution
  modified_base 2: mod_base = OTHER; note = 2'-fluoroguanosine with a 3'-phosphorothioate linkage
  modified_base 3: mod_base = cm
  modified_base 4: mod_base = cm
  modified_base 5: mod_base = OTHER; note = 2'-fluoroadenosine
  modified_base 6: mod_base = cm
  modified_base 7: mod_base = OTHER; note = 2'-fluoroguanosine
  modified_base 8: mod_base = OTHER; note = 2'-O-methyladenosine
  modified_base 9: mod_base = cm
  modified_base 10: mod_base = um
  modified_base 11: mod_base = cm
  modified_base 12: mod_base = um
  modified_base 13: mod_base = gm
  modified_base 14: mod_base = OTHER; note = 2'-fluorocytidine
  modified_base 15: mod_base = um
  modified_base 16: mod_base = OTHER; note = 2'-fluorouridine
  modified_base 17: mod_base = um
  modified_base 18: mod_base = OTHER; note = 2'-O-methyladenosine
  modified_base 19: mod_base = OTHER; note = 2'-O-methyladenosine
  modified_base 20: mod_base = um
  modified_base 21: mod_base = OTHER; note = 2'-O-methylguanosine with a 3'-phosphorothioate linkage
  modified_base 22: mod_base = OTHER; note = 2'-O-methyladenosine with a 3'-phosphorothioate linkage
  modified_base 23: mod_base = gm
tgccacgactctgctttaatgag

SEQ ID NO: 130 - RNA, 23 nt, synthetic construct
  source 1..23: mol_type = other RNA
  modified_base 1: mod_base = OTHER; note = 2'-O-methyluridine with a 3'-phosphorothioate linkage and a 5'-phosphate substitution
  modified_base 2: mod_base = OTHER; note = 2'-fluorocytidine with a 3'-phosphorothioate linkage
  modified_base 3: mod_base = OTHER; note = 2'-O-methyladenosine
  modified_base 4: mod_base = gm
  modified_base 5: mod_base = OTHER; note = 2'-fluoroguanosine
  modified_base 6: mod_base = cm
  modified_base 7: mod_base = OTHER; note = 2'-fluoroadenosine
  modified_base 8: mod_base = gm
  modified_base 9: mod_base = OTHER; note = 2'-O-methyladenosine
  modified_base 10: mod_base = um
  modified_base 11: mod_base = um
  modified_base 12: mod_base = cm
  modified_base 13: mod_base = OTHER; note = 2'-O-methyladenosine
  modified_base 14: mod_base = OTHER; note = 2'-fluoroguanosine
  modified_base 15: mod_base = gm
  modified_base 16: mod_base = OTHER; note = 2'-fluorocytidine
  modified_base 17: mod_base = um
  modified_base 18: mod_base = gm
  modified_base 19: mod_base = gm
  modified_base 20: mod_base = gm
  modified_base 21: mod_base = OTHER; note = 2'-O-methyladenosine with a 3'-phosphorothioate linkage
  modified_base 22: mod_base = OTHER; note = 2'-O-methylguanosine with a 3'-phosphorothioate linkage
  modified_base 23: mod_base = cm
tcaggcagattcaggctgggagc

SEQ ID NO: 131 - RNA, 23 nt, synthetic construct
  source 1..23: mol_type = other RNA
  modified_base 1: mod_base = OTHER; note = 2'-O-methyluridine with a 3'-phosphorothioate linkage and a 5'-phosphate substitution
  modified_base 2: mod_base = OTHER; note = 2'-fluoroguanosine with a 3'-phosphorothioate linkage
  modified_base 3: mod_base = OTHER; note = 2'-O-methyladenosine
  modified_base 4: mod_base = OTHER; note = 2'-O-methyladenosine
  modified_base 5: mod_base = OTHER; note = 2'-fluoroguanosine
  modified_base 6: mod_base = um
  modified_base 7: mod_base = OTHER; note = 2'-fluorouridine
  modified_base 8: mod_base = cm
  modified_base 9: mod_base = cm
  modified_base 10: mod_base = um
  modified_base 11: mod_base = gm
  modified_base 12: mod_base = gm
  modified_base 13: mod_base = gm
  modified_base 14: mod_base = OTHER; note = 2'-fluorocytidine
  modified_base 15: mod_base = um
  modified_base 16: mod_base = OTHER; note = 2'-fluoroguanosine
  modified_base 17: mod_base = cm
  modified_base 18: mod_base = OTHER; note = 2'-O-methyladenosine
  modified_base 19: mod_base = um
  modified_base 20: mod_base = cm
  modified_base 21: mod_base = OTHER; note = 2'-O-methylcytidine with a 3'-phosphorothioate linkage
  modified_base 22: mod_base = OTHER; note = 2'-O-methylcytidine with a 3'-phosphorothioate linkage
  modified_base 23: mod_base = gm
tgaagttcctgggctgcatcccg

SEQ ID NO: 132 - RNA, 23 nt, synthetic construct
  source 1..23: mol_type = other RNA
  modified_base 1: mod_base = OTHER; note = 2'-O-methyluridine with a 3'-phosphorothioate linkage and a 5'-phosphate substitution
  modified_base 2: mod_base = OTHER; note = 2'-fluorouridine with a 3'-phosphorothioate linkage
  modified_base 3: mod_base = cm
  modified_base 4: mod_base = cm
  modified_base 5: mod_base = OTHER; note = 2'-fluorouridine
  modified_base 6: mod_base = cm
  modified_base 7: mod_base = OTHER; note = 2'-fluoroadenosine
  modified_base 8: mod_base = gm
  modified_base 9: mod_base = cm
  modified_base 10: mod_base = um
  modified_base 11: mod_base = gm
  modified_base 12: mod_base = gm
  modified_base 13: mod_base = OTHER; note = 2'-O-methyladenosine
  modified_base 14: mod_base = OTHER; note = 2'-fluorocytidine
  modified_base 15: mod_base = um
  modified_base 16: mod_base = OTHER; note = 2'-fluorouridine
  modified_base 17: mod_base = cm
  modified_base 18: mod_base = um
  modified_base 19: mod_base = OTHER; note = 2'-O-methyladenosine
  modified_base 20: mod_base = gm
  modified_base 21: mod_base = OTHER; note = 2'-O-methylcytidine with a 3'-phosphorothioate linkage
  modified_base 22: mod_base = OTHER; note = 2'-O-methylcytidine with a 3'-phosphorothioate linkage
  modified_base 23: mod_base = gm
ttcctcagctggacttctagccg

SEQ ID NO: 133 - RNA, 23 nt, synthetic construct
  source 1..23: mol_type = other RNA
  modified_base 1: mod_base = OTHER; note = 2'-O-methyluridine with a 3'-phosphorothioate linkage and a 5'-phosphate substitution
  modified_base 2: mod_base = OTHER; note = 2'-fluorouridine with a 3'-phosphorothioate linkage
  modified_base 3: mod_base = cm
  modified_base 4: mod_base = gm
  modified_base 5: mod_base = OTHER; note = 2'-fluorocytidine
  modified_base 6: mod_base = OTHER; note = 2'-O-methyladenosine
  modified_base 7: mod_base = OTHER; note = 2'-fluoroguanosine
  modified_base 8: mod_base = cm
  modified_base 9: mod_base = cm
  modified_base 10: mod_base = gm
  modified_base 11: mod_base = OTHER; note = 2'-O-methyladenosine
  modified_base 12: mod_base = um
  modified_base 13: mod_base = gm
  modified_base 14: mod_base = OTHER; note = 2'-fluorocytidine
  modified_base 15: mod_base = um
  modified_base 16: mod_base = OTHER; note = 2'-fluoroguanosine
  modified_base 17: mod_base = cm
  modified_base 18: mod_base = um
  modified_base 19: mod_base = gm
  modified_base 20: mod_base = um
  modified_base 21: mod_base = OTHER; note = 2'-O-methylguanosine with a 3'-phosphorothioate linkage
  modified_base 22: mod_base = OTHER; note = 2'-O-methylcytidine with a 3'-phosphorothioate linkage
  modified_base 23: mod_base = cm
ttcgcagccgatgctgctgtgcc

SEQ ID NO: 134 - RNA, 23 nt, synthetic construct
  source 1..23: mol_type = other RNA
  modified_base 1: mod_base = OTHER; note = 2'-O-methyluridine with a 3'-phosphorothioate linkage and a 5'-phosphate substitution
  modified_base 2: mod_base = OTHER; note = 2'-fluoroadenosine with a 3'-phosphorothioate linkage
  modified_base 3: mod_base = cm
  modified_base 4: mod_base = OTHER; note = 2'-O-methyladenosine
  modified_base 5: mod_base = OTHER; note = 2'-fluoroguanosine
  modified_base 6: mod_base = gm
  modified_base 7: mod_base = OTHER; note = 2'-fluorocytidine
  modified_base 8: mod_base = um
  modified_base 9: mod_base = um
  modified_base 10: mod_base = gm
  modified_base 11: mod_base = cm
  modified_base 12: mod_base = cm
  modified_base 13: mod_base = cm
  modified_base 14: mod_base = OTHER; note = 2'-fluoroguanosine
  modified_base 15: mod_base = OTHER; note = 2'-O-methyladenosine
  modified_base 16: mod_base = OTHER; note = 2'-fluoroadenosine
  modified_base 17: mod_base = gm
  modified_base 18: mod_base = um
  modified_base 19: mod_base = um
  modified_base 20: mod_base = cm
  modified_base 21: mod_base = OTHER; note = 2'-O-methylcytidine with a 3'-phosphorothioate linkage
  modified_base 22: mod_base = OTHER; note = 2'-O-methyluridine with a 3'-phosphorothioate linkage
  modified_base 23: mod_base = gm
tacaggcttgcccgaagttcctg

SEQ ID NO: 135 - RNA, 23 nt, synthetic construct
  source 1..23: mol_type = other RNA
  modified_base 1: mod_base = OTHER; note = 2'-O-methyluridine with a 3'-phosphorothioate linkage and a 5'-phosphate substitution
  modified_base 2: mod_base = OTHER; note = 2'-fluoroguanosine with a 3'-phosphorothioate linkage
  modified_base 3: mod_base = cm
  modified_base 4: mod_base = gm
  modified_base 5: mod_base = OTHER; note = 2'-fluorocytidine
  modified_base 6: mod_base = cm
  modified_base 7: mod_base = OTHER; note = 2'-fluorocytidine
  modified_base 8: mod_base = um
  modified_base 9: mod_base = gm
  modified_base 10: mod_base = gm
  modified_base 11: mod_base = cm
  modified_base 12: mod_base = um
  modified_base 13: mod_base = gm
  modified_base 14: mod_base = OTHER; note = 2'-fluoroadenosine
  modified_base 15: mod_base = um
  modified_base 16: mod_base = OTHER; note = 2'-fluorocytidine
  modified_base 17: mod_base = cm
  modified_base 18: mod_base = cm
  modified_base 19: mod_base = OTHER; note = 2'-O-methyladenosine
  modified_base 20: mod_base = gm
  modified_base 21: mod_base = OTHER; note = 2'-O-methyluridine with a 3'-phosphorothioate linkage
  modified_base 22: mod_base = OTHER; note = 2'-O-methylguanosine with a 3'-phosphorothioate linkage
  modified_base 23: mod_base = OTHER; note = 2'-O-methyladenosine
tgcgccctggctgatcccagtga

SEQ ID NO: 136 - RNA, 23 nt, synthetic construct
  source 1..23: mol_type = other RNA
  modified_base 1: mod_base = OTHER; note = 2'-O-methyluridine with a 3'-phosphorothioate linkage and a 5'-phosphate substitution
  modified_base 2: mod_base = OTHER; note = 2'-fluorocytidine with a 3'-phosphorothioate linkage
  modified_base 3: mod_base = gm
  modified_base 4: mod_base = cm
  modified_base 5: mod_base = OTHER; note = 2'-fluorouridine
  modified_base 6: mod_base = cm
  modified_base 7: mod_base = OTHER; note = 2'-fluorocytidine
  modified_base 8: mod_base = um
  modified_base 9: mod_base = cm
  modified_base 10: mod_base = OTHER; note = 2'-O-methyladenosine
  modified_base 11: mod_base = gm
  modified_base 12: mod_base = cm
  modified_base 13: mod_base = um
  modified_base 14: mod_base = OTHER; note = 2'-fluoroguanosine
  modified_base 15: mod_base = gm
  modified_base 16: mod_base = OTHER; note = 2'-fluoroadenosine
  modified_base 17: mod_base = cm
  modified_base 18: mod_base = um
  modified_base 19: mod_base = um
  modified_base 20: mod_base = cm
  modified_base 21: mod_base = OTHER; note = 2'-O-methyluridine with a 3'-phosphorothioate linkage
  modified_base 22: mod_base = OTHER; note = 2'-O-methyladenosine with a 3'-phosphorothioate linkage
  modified_base 23: mod_base = gm
tcgctcctcagctggacttctag

SEQ ID NO: 137 - RNA, 23 nt, synthetic construct
  source 1..23: mol_type = other RNA
  modified_base 1: mod_base = OTHER; note = 2'-O-methyluridine with a 3'-phosphorothioate linkage and a 5'-phosphate substitution
  modified_base 2: mod_base = OTHER; note = 2'-fluoroguanosine with a 3'-phosphorothioate linkage
  modified_base 3: mod_base = gm
  modified_base 4: mod_base = OTHER; note = 2'-O-methyladenosine
  modified_base 5: mod_base = OTHER; note = 2'-fluorouridine
  modified_base 6: mod_base = cm
  modified_base 7: mod_base = OTHER; note = 2'-fluorouridine
  modified_base 8: mod_base = gm
  modified_base 9: mod_base = um
  modified_base 10: mod_base = cm
  modified_base 11: mod_base = gm
  modified_base 12: mod_base = cm
  modified_base 13: mod_base = OTHER; note = 2'-O-methyladenosine
  modified_base 14: mod_base = OTHER; note = 2'-fluoroguanosine
  modified_base 15: mod_base = cm
  modified_base 16: mod_base = OTHER; note = 2'-fluorocytidine
  modified_base 17: mod_base = gm
  modified_base 18: mod_base = OTHER; note = 2'-O-methyladenosine
  modified_base 19: mod_base = um
  modified_base 20: mod_base = gm
  modified_base 21: mod_base = OTHER; note = 2'-O-methylcytidine with a 3'-phosphorothioate linkage
  modified_base 22: mod_base = OTHER; note = 2'-O-methyluridine with a 3'-phosphorothioate linkage
  modified_base 23: mod_base = gm
tggatctgtcgcagccgatgctg

SEQ ID NO: 138 - RNA, 23 nt, synthetic construct
  source 1..23: mol_type = other RNA
  modified_base 1: mod_base = OTHER; note = 2'-O-methyluridine with a 3'-phosphorothioate linkage and a 5'-phosphate substitution
  modified_base 2: mod_base = OTHER; note = 2'-fluoroadenosine with a 3'-phosphorothioate linkage
  modified_base 3: mod_base = um
  modified_base 4: mod_base = gm
  modified_base 5: mod_base = OTHER; note = 2'-fluorocytidine
  modified_base 6: mod_base = um
  modified_base 7: mod_base = OTHER; note = 2'-fluoroguanosine
  modified_base 8: mod_base = cm
  modified_base 9: mod_base = um
  modified_base 10: mod_base = gm
  modified_base 11: mod_base = um
  modified_base 12: mod_base = gm
  modified_base 13: mod_base = cm
  modified_base 14: mod_base = OTHER; note = 2'-fluorocytidine
  modified_base 15: mod_base = OTHER; note = 2'-O-methyladenosine
  modified_base 16: mod_base = OTHER; note = 2'-fluorocytidine
  modified_base 17: mod_base = cm
  modified_base 18: mod_base = OTHER; note = 2'-O-methyladenosine
  modified_base 19: mod_base = um
  modified_base 20: mod_base = cm
  modified_base 21: mod_base = OTHER; note = 2'-O-methyluridine with a 3'-phosphorothioate linkage
  modified_base 22: mod_base = OTHER; note = 2'-O-methylcytidine with a 3'-phosphorothioate linkage
  modified_base 23: mod_base = cm
tatgctgctgtgccaccatctcc

SEQ ID NO: 139 - RNA, 23 nt, synthetic construct
  source 1..23: mol_type = other RNA
  modified_base 1: mod_base = OTHER; note = 2'-O-methyluridine with a 3'-phosphorothioate linkage and a 5'-phosphate substitution
  modified_base 2: mod_base = OTHER; note = 2'-fluoroguanosine with a 3'-phosphorothioate linkage
  modified_base 3: mod_base = cm
  modified_base 4: mod_base = cm
  modified_base 5: mod_base = OTHER; note = 2'-fluoroguanosine
  modified_base 6: mod_base = OTHER; note = 2'-O-methyladenosine
  modified_base 7: mod_base = OTHER; note = 2'-fluorouridine
  modified_base 8: mod_base = gm
  modified_base 9: mod_base = cm
  modified_base 10: mod_base = um
  modified_base 11: mod_base = gm
  modified_base 12: mod_base = cm
  modified_base 13: mod_base = um
  modified_base 14: mod_base = OTHER; note = 2'-fluoroguanosine
  modified_base 15: mod_base = um
  modified_base 16: mod_base = OTHER; note = 2'-fluoroguanosine
  modified_base 17: mod_base = cm
  modified_base 18: mod_base = cm
  modified_base 19: mod_base = OTHER; note = 2'-O-methyladenosine
  modified_base 20: mod_base = cm
  modified_base 21: mod_base = OTHER; note = 2'-O-methylcytidine with a 3'-phosphorothioate linkage
  modified_base 22: mod_base = OTHER; note = 2'-O-methyladenosine with a 3'-phosphorothioate linkage
  modified_base 23: mod_base = um
tgccgatgctgctgtgccaccat

SEQ ID NO: 140 - RNA, 23 nt, synthetic construct
  source 1..23: mol_type = other RNA
  modified_base 1: mod_base = OTHER; note = 2'-O-methyluridine with a 3'-phosphorothioate linkage and a 5'-phosphate substitution
  modified_base 2: mod_base = OTHER; note = 2'-fluoroguanosine with a 3'-phosphorothioate linkage
  modified_base 3: mod_base = um
  modified_base 4: mod_base = cm
  modified_base 5: mod_base = OTHER; note = 2'-fluoroguanosine
  modified_base 6: mod_base = cm
  modified_base 7: mod_base = OTHER; note = 2'-fluoroadenosine
  modified_base 8: mod_base = gm
  modified_base 9: mod_base = cm
  modified_base 10: mod_base = cm
  modified_base 11: mod_base = gm
  modified_base 12: mod_base = OTHER; note = 2'-O-methyladenosine
  modified_base 13: mod_base = um
  modified_base 14: mod_base = OTHER; note = 2'-fluoroguanosine
  modified_base 15: mod_base = cm
  modified_base 16: mod_base = OTHER; note = 2'-fluorouridine
  modified_base 17: mod_base = gm
  modified_base 18: mod_base = cm
  modified_base 19: mod_base = um
  modified_base 20: mod_base = gm
  modified_base 21: mod_base = OTHER; note = 2'-O-methyluridine with a 3'-phosphorothioate linkage
  modified_base 22: mod_base = OTHER; note = 2'-O-methylguanosine with a 3'-phosphorothioate linkage
  modified_base 23: mod_base = cm
tgtcgcagccgatgctgctgtgc

SEQ ID NO: 141 - RNA, 23 nt, synthetic construct
  source 1..23: mol_type = other RNA
  modified_base 1: mod_base = OTHER; note = 2'-O-methyluridine with a 3'-phosphorothioate linkage and a 5'-phosphate substitution
  modified_base 2: mod_base = OTHER; note = 2'-fluorouridine with a 3'-phosphorothioate linkage
  modified_base 3: mod_base = gm
  modified_base 4: mod_base = cm
  modified_base 5: mod_base = OTHER; note = 2'-fluorouridine
  modified_base 6: mod_base = um
  modified_base 7: mod_base = OTHER; note = 2'-fluoroguanosine
  modified_base 8: mod_base = um
  modified_base 9: mod_base = cm
  modified_base 10: mod_base = OTHER; note = 2'-O-methyladenosine
  modified_base 11: mod_base = gm
  modified_base 12: mod_base = cm
  modified_base 13: mod_base = gm
  modified_base 14: mod_base = OTHER; note = 2'-fluorouridine
  modified_base 15: mod_base = gm
  modified_base 16: mod_base = OTHER; note = 2'-fluoroadenosine
  modified_base 17: mod_base = gm
  modified_base 18: mod_base = cm
  modified_base 19: mod_base = cm
  modified_base 20: mod_base = um
  modified_base 21: mod_base = OTHER; note = 2'-O-methyluridine with a 3'-phosphorothioate linkage
  modified_base 22: mod_base = OTHER; note = 2'-O-methyluridine with a 3'-phosphorothioate linkage
  modified_base 23: mod_base = OTHER; note = 2'-O-methyladenosine
ttgcttgtcagcgtgagccttta

SEQ ID NO: 142 - RNA, 23 nt, synthetic construct
  source 1..23: mol_type = other RNA
  modified_base 1: mod_base = OTHER; note = 2'-O-methyluridine with a 3'-phosphorothioate linkage and a 5'-phosphate substitution
  modified_base 2: mod_base = OTHER; note = 2'-fluorocytidine with a 3'-phosphorothioate linkage
  modified_base 3: mod_base = OTHER; note = 2'-O-methyladenosine
  modified_base 4: mod_base = um
  modified_base 5: mod_base = OTHER; note = 2'-fluorocytidine
  modified_base 6: mod_base = cm
  modified_base 7: mod_base = OTHER; note = 2'-fluoroadenosine
  modified_base 8: mod_base = gm
  modified_base 9: mod_base = gm
  modified_base 10: mod_base = cm
  modified_base 11: mod_base = OTHER; note = 2'-O-methyladenosine
  modified_base 12: mod_base = gm
  modified_base 13: mod_base = OTHER; note = 2'-O-methyladenosine
  modified_base 14: mod_base = OTHER; note = 2'-fluorouridine
  modified_base 15: mod_base = um
  modified_base 16: mod_base = OTHER; note = 2'-fluorocytidine
  modified_base 17: mod_base = OTHER; note = 2'-O-methyladenosine
  modified_base 18: mod_base = gm
  modified_base 19: mod_base = gm
  modified_base 20: mod_base = cm
  modified_base 21: mod_base = OTHER; note = 2'-O-methyluridine with a 3'-phosphorothioate linkage
  modified_base 22: mod_base = OTHER; note = 2'-O-methylguanosine with a 3'-phosphorothioate linkage
  modified_base 23: mod_base = gm
tcatccaggcagattcaggctgg

SEQ ID NO: 143 - RNA, 23 nt, synthetic construct
  source 1..23: mol_type = other RNA
  modified_base 1: mod_base = OTHER; note = 2'-O-methyluridine with a 3'-phosphorothioate linkage and a 5'-phosphate substitution
  modified_base 2: mod_base = OTHER; note = 2'-fluorocytidine with a 3'-phosphorothioate linkage
  modified_base 3: mod_base = um
  modified_base 4: mod_base = gm
  modified_base 5: mod_base = OTHER; note = 2'-fluoroguanosine
  modified_base 6: mod_base = OTHER; note = 2'-O-methyladenosine
  modified_base 7: mod_base = OTHER; note = 2'-fluorouridine
  modified_base 8: mod_base = cm
  modified_base 9: mod_base = um
  modified_base 10: mod_base = gm
  modified_base 11: mod_base = um
  modified_base 12: mod_base = cm
  modified_base 13: mod_base = gm
  modified_base 14: mod_base = OTHER; note = 2'-fluorocytidine
  modified_base 15: mod_base = OTHER; note = 2'-O-methyladenosine
  modified_base 16: mod_base = OTHER; note = 2'-fluoroguanosine
  modified_base 17: mod_base = cm
  modified_base 18: mod_base = cm
  modified_base 19: mod_base = gm
  modified_base 20: mod_base = OTHER; note = 2'-O-methyladenosine
  modified_base 21: mod_base = OTHER; note = 2'-O-methyluridine with a 3'-phosphorothioate linkage
  modified_base 22: mod_base = OTHER; note = 2'-O-methylguanosine with a 3'-phosphorothioate linkage
  modified_base 23: mod_base = cm
tctggatctgtcgcagccgatgc

SEQ ID NO: 144 - RNA, 23 nt, synthetic construct
  source 1..23: mol_type = other RNA
  modified_base 1: mod_base = OTHER; note = 2'-O-methyluridine with a 3'-phosphorothioate linkage and a 5'-phosphate substitution
  modified_base 2: mod_base = OTHER; note = 2'-fluoroadenosine with a 3'-phosphorothioate linkage
  modified_base 3: mod_base = gm
  modified_base 4: mod_base = gm
  modified_base 5: mod_base = OTHER; note = 2'-fluorocytidine
  modified_base 6: mod_base = gm
  modified_base 7: mod_base = OTHER; note = 2'-fluorocytidine
  modified_base 8: mod_base = um
  modified_base 9: mod_base = cm
  modified_base 10: mod_base = cm
  modified_base 11: mod_base = um
  modified_base 12: mod_base = cm
  modified_base 13: mod_base = OTHER; note = 2'-O-methyladenosine
  modified_base 14: mod_base = OTHER; note = 2'-fluoroguanosine
  modified_base 15: mod_base = cm
  modified_base 16: mod_base = OTHER; note = 2'-fluorouridine
  modified_base 17: mod_base = gm
  modified_base 18: mod_base = gm
  modified_base 19: mod_base = OTHER; note = 2'-O-methyladenosine
  modified_base 20: mod_base = cm
  modified_base 21: mod_base = OTHER; note = 2'-O-methyluridine with a 3'-phosphorothioate linkage
  modified_base 22: mod_base = OTHER; note = 2'-O-methyluridine with a 3'-phosphorothioate linkage
  modified_base 23: mod_base = cm
taggcgctcctcagctggacttc

SEQ ID NO: 145 - RNA, 23 nt, synthetic construct
  source 1..23: mol_type = other RNA
  modified_base 1: mod_base = OTHER; note = 2'-O-methyluridine with a 3'-phosphorothioate linkage and a 5'-phosphate substitution
  modified_base 2: mod_base = OTHER; note = 2'-fluoroadenosine with a 3'-phosphorothioate linkage
  modified_base 3: mod_base = cm
  modified_base 4: mod_base = cm
  modified_base 5: mod_base = OTHER; note = 2'-fluoroadenosine
  modified_base 6: mod_base = um
  modified_base 7: mod_base = OTHER; note = 2'-fluorocytidine
  modified_base 8: mod_base = um
  modified_base 9: mod_base = cm
  modified_base 10: mod_base = cm
  modified_base 11: mod_base = cm
  modified_base 12: mod_base = gm
  modified_base 13: mod_base = cm
  modified_base 14: mod_base = OTHER; note = 2'-fluorocytidine
  modified_base 15: mod_base = um
  modified_base 16: mod_base = OTHER; note = 2'-fluorocytidine
  modified_base 17: mod_base = um
  modified_base 18: mod_base = gm
  modified_base 19: mod_base = cm
  modified_base 20: mod_base = cm
  modified_base 21: mod_base = OTHER; note = 2'-O-methylguanosine with a 3'-phosphorothioate linkage
  modified_base 22: mod_base = OTHER; note = 2'-O-methylcytidine with a 3'-phosphorothioate linkage
  modified_base 23: mod_base = um
taccatctcccgcctctgccgct

SEQ ID NO: 146 - RNA, 23 nt, synthetic construct
  source 1..23: mol_type = other RNA
  modified_base 1: mod_base = OTHER; note = 2'-O-methyluridine with a 3'-phosphorothioate linkage and a 5'-phosphate substitution
  modified_base 2: mod_base = OTHER; note = 2'-fluoroguanosine with a 3'-phosphorothioate linkage
  modified_base 3: mod_base = gm
  modified_base 4: mod_base = OTHER; note = 2'-O-methyladenosine
  modified_base 5: mod_base = OTHER; note = 2'-fluoroadenosine
  modified_base 6: mod_base = gm
  modified_base 7: mod_base = OTHER; note = 2'-fluorouridine
  modified_base 8: mod_base = gm
  modified_base 9: mod_base = um
  modified_base 10: mod_base = um
  modified_base 11: mod_base = cm
  modified_base 12: mod_base = cm
  modified_base 13: mod_base = um
  modified_base 14: mod_base = OTHER; note = 2'-fluorouridine
  modified_base 15: mod_base = gm
  modified_base 16: mod_base = OTHER; note = 2'-fluorocytidine
  modified_base 17: mod_base = OTHER; note = 2'-O-methyladenosine
  modified_base 18: mod_base = gm
  modified_base 19: mod_base = cm
  modified_base 20: mod_base = OTHER; note = 2'-O-methyladenosine
  modified_base 21: mod_base = OTHER; note = 2'-O-methyluridine with a 3'-phosphorothioate linkage
  modified_base 22: mod_base = OTHER; note = 2'-O-methylguanosine with a 3'-phosphorothioate linkage
  modified_base 23: mod_base = OTHER; note = 2'-O-methyladenosine
tggaagtgttccttgcagcatga

SEQ ID NO: 147 - RNA, 23 nt, synthetic construct
  source 1..23: mol_type = other RNA
  modified_base 1: mod_base = OTHER; note = 2'-O-methyluridine with a 3'-phosphorothioate linkage and a 5'-phosphate substitution
  modified_base 2: mod_base = OTHER; note = 2'-fluorouridine with a 3'-phosphorothioate linkage
  modified_base 3: mod_base = cm
  modified_base 4: mod_base = cm
  modified_base 5: mod_base = OTHER; note = 2'-fluoroadenosine
  modified_base 6: mod_base = OTHER; note = 2'-O-methyladenosine
  modified_base 7: mod_base = OTHER; note = 2'-fluorocytidine
  modified_base 8: mod_base = OTHER; note = 2'-O-methyladenosine
  modified_base 9: mod_base = gm
  modified_base 10: mod_base = gm
  modified_base 11: mod_base = cm
  modified_base 12: mod_base = um
  modified_base 13: mod_base = um
  modified_base 14: mod_base = OTHER; note = 2'-fluoroguanosine
  modified_base 15: mod_base = cm
  modified_base 16: mod_base = OTHER; note = 2'-fluorocytidine
  modified_base 17: mod_base = cm
  modified_base 18: mod_base = gm
  modified_base 19: mod_base = OTHER; note = 2'-O-methyladenosine
  modified_base 20: mod_base = OTHER; note = 2'-O-methyladenosine
  modified_base 21: mod_base = OTHER; note = 2'-O-methylguanosine with a 3'-phosphorothioate linkage
  modified_base 22: mod_base = OTHER; note = 2'-O-methyluridine with a 3'-phosphorothioate linkage
  modified_base 23: mod_base = um
ttccaacaggcttgcccgaagtt

SEQ ID NO: 148 - RNA, 23 nt, synthetic construct
  source 1..23: mol_type = other RNA
  modified_base 1: mod_base = OTHER; note = 2'-O-methyluridine with a 3'-phosphorothioate linkage and a 5'-phosphate substitution
  modified_base 2: mod_base = OTHER; note = 2'-fluorocytidine with a 3'-phosphorothioate linkage
  modified_base 3: mod_base = cm
  modified_base 4: mod_base = cm
  modified_base 5: mod_base = OTHER; note = 2'-fluoroadenosine
  modified_base 6: mod_base = gm
  modified_base 7: mod_base = OTHER; note = 2'-fluorouridine
  modified_base 8: mod_base = gm
  modified_base 9: mod_base = OTHER; note = 2'-O-methyladenosine
  modified_base 10: mod_base = OTHER; note = 2'-O-methyladenosine
  modified_base 11: mod_base = cm
  modified_base 12: mod_base = OTHER; note = 2'-O-methyladenosine
  modified_base 13: mod_base = gm
  modified_base 14: mod_base = OTHER; note = 2'-fluoroguanosine
  modified_base 15: mod_base = cm
  modified_base 16: mod_base = OTHER; note = 2'-fluoroadenosine
  modified_base 17: mod_base = gm
  modified_base 18: mod_base = cm
  modified_base 19: mod_base = um
  modified_base 20: mod_base = cm
  modified_base 21: mod_base = OTHER; note = 2'-O-methylcytidine with a 3'-phosphorothioate linkage
  modified_base 22: mod_base = OTHER; note = 2'-O-methyluridine with a 3'-phosphorothioate linkage
  modified_base 23: mod_base = cm
tcccagtgaacaggcagctcctc

SEQ ID NO: 149 - RNA, 23 nt, synthetic construct
  source 1..23: mol_type = other RNA
  modified_base 1: mod_base = OTHER; note = 2'-O-methyluridine with a 3'-phosphorothioate linkage and a 5'-phosphate substitution
  modified_base 2: mod_base = OTHER; note = 2'-fluoroguanosine with a 3'-phosphorothioate linkage
  modified_base 3: mod_base = um
  modified_base 4: mod_base = cm
  modified_base 5: mod_base = OTHER; note = 2'-fluorocytidine
  modified_base 6: mod_base = um
  modified_base 7: mod_base = OTHER; note = 2'-fluorocytidine
  modified_base 8: mod_base = OTHER; note = 2'-O-methyladenosine
  modified_base 9: mod_base = gm
  modified_base 10: mod_base = um
  modified_base 11: mod_base = um
  modified_base 12: mod_base = cm
  modified_base 13: mod_base = cm
  modified_base 14: mod_base = OTHER; note = 2'-fluoroadenosine
  modified_base 15: mod_base = um
  modified_base 16: mod_base = OTHER; note = 2'-fluorocytidine
  modified_base 17: mod_base = cm
  modified_base 18: mod_base = OTHER; note = 2'-O-methyladenosine
  modified_base 19: mod_base = gm
  modified_base 20: mod_base = gm
  modified_base 21: mod_base = OTHER; note = 2'-O-methylcytidine with a 3'-phosphorothioate linkage
  modified_base 22: mod_base = OTHER; note = 2'-O-methyladenosine with a 3'-phosphorothioate linkage
  modified_base 23: mod_base = gm
tgtcctcagttccatccaggcag

SEQ ID NO: 150 - RNA, 23 nt, synthetic construct
  source 1..23: mol_type = other RNA
  modified_base 1: mod_base = OTHER; note = 2'-O-methyluridine with a 3'-phosphorothioate linkage and a 5'-phosphate substitution
  modified_base 2: mod_base = OTHER; note = 2'-fluoroguanosine with a 3'-phosphorothioate linkage
  modified_base 3: mod_base = gm
  modified_base 4: mod_base = gm
  modified_base 5: mod_base = OTHER; note = 2'-fluorocytidine
  modified_base 6: mod_base = gm
  modified_base 7: mod_base = OTHER; note = 2'-fluorouridine
  modified_base 8: mod_base = gm
  modified_base 9: mod_base = gm
  modified_base 10: mod_base = OTHER; note = 2'-O-methyladenosine
  modified_base 11: mod_base = OTHER; note = 2'-O-methyladenosine
  modified_base 12: mod_base = gm
  modified_base 13: mod_base = um
  modified_base 14: mod_base = OTHER; note = 2'-fluoroguanosine
  modified_base 15: mod_base = um
  modified_base 16: mod_base = OTHER; note = 2'-fluorouridine
  modified_base 17: mod_base = cm
  modified_base 18: mod_base = cm
  modified_base 19: mod_base = um
  modified_base 20: mod_base = um
  modified_base 21: mod_base = OTHER; note = 2'-O-methylguanosine with a 3'-phosphorothioate linkage
  modified_base 22: mod_base = OTHER; note = 2'-O-methylcytidine with a 3'-phosphorothioate linkage
  modified_base 23: mod_base = OTHER; note = 2'-O-methyladenosine
tgggcgtggaagtgttccttgca

SEQ ID NO: 151 - RNA, 23 nt, synthetic construct
  source 1..23: mol_type = other RNA
  modified_base 1: mod_base = OTHER; note = 2'-O-methyluridine with a 3'-phosphorothioate linkage and a 5'-phosphate substitution
  modified_base 2: mod_base = OTHER; note = 2'-fluorocytidine with a 3'-phosphorothioate linkage
  modified_base 3: mod_base = cm
  modified_base 4: mod_base = um
  modified_base 5: mod_base = OTHER; note = 2'-fluorocytidine
  modified_base 6: mod_base = OTHER; note = 2'-O-methyladenosine
  modified_base 7: mod_base = OTHER; note = 2'-fluoroguanosine
  modified_base 8: mod_base = cm
  modified_base 9: mod_base = um
  modified_base 10: mod_base = gm
  modified_base 11: mod_base = gm
  modified_base 12: mod_base = OTHER; note = 2'-O-methyladenosine
  modified_base 13: mod_base = cm
  modified_base 14: mod_base = OTHER; note = 2'-fluorouridine
  modified_base 15: mod_base = um
  modified_base 16: mod_base = OTHER; note = 2'-fluorocytidine
  modified_base 17: mod_base = um
  modified_base 18: mod_base = OTHER; note = 2'-O-methyladenosine
  modified_base 19: mod_base = gm
  modified_base 20: mod_base = cm
  modified_base 21: mod_base = OTHER; note = 2'-O-methylcytidine with a 3'-phosphorothioate linkage
  modified_base 22: mod_base = OTHER; note = 2'-O-methylguanosine with a 3'-phosphorothioate linkage
  modified_base 23: mod_base = cm
tcctcagctggacttctagccgc

SEQ ID NO: 152 - RNA, 23 nt, synthetic construct
  source 1..23: mol_type = other RNA
  modified_base 1: mod_base = OTHER; note = 2'-O-methyluridine with a 3'-phosphorothioate linkage and a 5'-phosphate substitution
  modified_base 2: mod_base = OTHER; note = 2'-fluorocytidine with a 3'-phosphorothioate linkage
  modified_base 3: mod_base = gm
  modified_base 4: mod_base = um
  modified_base 5: mod_base = OTHER; note = 2'-fluoroguanosine
  modified_base 6: mod_base = OTHER; note = 2'-O-methyladenosine
  modified_base 7: mod_base = OTHER; note = 2'-fluoroguanosine
  modified_base 8: mod_base = cm
  modified_base 9: mod_base = cm
  modified_base 10: mod_base = um
  modified_base 11: mod_base = um
  modified_base 12: mod_base = um
  modified_base 13: mod_base = OTHER; note = 2'-O-methyladenosine
  modified_base 14: mod_base = OTHER; note = 2'-fluoroadenosine
  modified_base 15: mod_base = gm
  modified_base 16: mod_base = OTHER; note = 2'-fluoroadenosine
  modified_base 17: mod_base = cm
  modified_base 18: mod_base = cm
  modified_base 19: mod_base = um
  modified_base 20: mod_base = cm
  modified_base 21: mod_base = OTHER; note = 2'-O-methyladenosine with a 3'-phosphorothioate linkage
  modified_base 22: mod_base = OTHER; note = 2'-O-methyladenosine with a 3'-phosphorothioate linkage
  modified_base 23: mod_base = OTHER; note = 2'-O-methyladenosine
tcgtgagcctttaagacctcaaa

SEQ ID NO: 153 - RNA, 23 nt, synthetic construct
  source 1..23: mol_type = other RNA
  modified_base 1: mod_base = OTHER; note = 2'-O-methyluridine with a 3'-phosphorothioate linkage and a 5'-phosphate substitution
  modified_base 2: mod_base = OTHER; note = 2'-fluoroadenosine with a 3'-phosphorothioate linkage
  modified_base 3: mod_base = gm
  modified_base 4: mod_base = um
  modified_base 5: mod_base = OTHER; note = 2'-fluorocytidine
  modified_base 6: mod_base = um
  modified_base 7: mod_base = OTHER; note = 2'-fluorocytidine
  modified_base 8: mod_base = cm
  modified_base 9: mod_base = OTHER; note = 2'-O-methyladenosine
  modified_base 10: mod_base = OTHER; note = 2'-O-methyladenosine
  modified_base 11: mod_base = cm
  modified_base 12: mod_base = OTHER; note = 2'-O-methyladenosine
  modified_base 13: mod_base = gm
  modified_base 14: mod_base = OTHER; note = 2'-fluoroguanosine
  modified_base 15: mod_base = cm
  modified_base 16: mod_base = OTHER; note = 2'-fluorouridine
  modified_base 17: mod_base = um
  modified_base 18: mod_base = gm
  modified_base 19: mod_base = cm
  modified_base 20: mod_base = cm
  modified_base 21: mod_base = OTHER; note = 2'-O-methylcytidine with a 3'-phosphorothioate linkage
  modified_base 22: mod_base = OTHER; note = 2'-O-methylguanosine with a 3'-phosphorothioate linkage
  modified_base 23: mod_base = OTHER; note = 2'-O-methyladenosine
tagtctccaacaggcttgcccga

SEQ ID NO: 154 - RNA, 23 nt, synthetic construct
  source 1..23: mol_type = other RNA
  modified_base 1: mod_base = OTHER; note = 2'-O-methyluridine with a 3'-phosphorothioate linkage and a 5'-phosphate substitution
  modified_base 2: mod_base = OTHER; note = 2'-fluorouridine with a 3'-phosphorothioate linkage
  modified_base 3: mod_base = cm
  modified_base 4: mod_base = OTHER; note = 2'-O-methyladenosine
  modified_base 5: mod_base = OTHER; note = 2'-fluoroguanosine
  modified_base 6: mod_base = cm
  modified_base 7: mod_base = OTHER; note = 2'-fluorouridine
  modified_base 8: mod_base = gm
  modified_base 9: mod_base = gm
  modified_base 10: mod_base = OTHER; note = 2'-O-methyladenosine
  modified_base 11: mod_base = cm
  modified_base 12: mod_base = um
  modified_base 13: mod_base = um
  modified_base 14: mod_base = OTHER; note = 2'-fluorocytidine
  modified_base 15: mod_base = um
  modified_base 16: mod_base = OTHER; note = 2'-fluoroadenosine
  modified_base 17: mod_base = gm
  modified_base 18: mod_base = cm
  modified_base 19: mod_base = cm
  modified_base 20: mod_base = gm
  modified_base 21: mod_base = OTHER; note = 2'-O-methylcytidine with a 3'-phosphorothioate linkage
  modified_base 22: mod_base = OTHER; note = 2'-O-methyluridine with a 3'-phosphorothioate linkage
  modified_base 23: mod_base = gm
ttcagctggacttctagccgctg

SEQ ID NO: 155 - RNA, 23 nt, synthetic construct
  source 1..23: mol_type = other RNA
  modified_base 1: mod_base = OTHER; note = 2'-O-methyluridine with a 3'-phosphorothioate linkage and a 5'-phosphate substitution
  modified_base 2: mod_base = OTHER; note = 2'-fluorocytidine with a 3'-phosphorothioate linkage
  modified_base 3: mod_base = OTHER; note = 2'-O-methyladenosine
  modified_base 4: mod_base = gm
  modified_base 5: mod_base = OTHER; note = 2'-fluorocytidine
  modified_base 6: mod_base = cm
  modified_base 7: mod_base = OTHER; note = 2'-fluoroguanosine
  modified_base 8: mod_base = OTHER; note = 2'-O-methyladenosine
  modified_base 9: mod_base = um
  modified_base 10: mod_base = gm
  modified_base 11: mod_base = cm
  modified_base 12: mod_base = um
  modified_base 13: mod_base = gm
  modified_base 14: mod_base = OTHER; note = 2'-fluorocytidine
  modified_base 15: mod_base = um
  modified_base 16: mod_base = OTHER; note = 2'-fluoroguanosine
  modified_base 17: mod_base = um
  modified_base 18: mod_base = gm
  modified_base 19: mod_base = cm
  modified_base 20: mod_base = cm
  modified_base 21: mod_base = OTHER; note = 2'-O-methyladenosine with a 3'-phosphorothioate linkage
  modified_base 22: mod_base = OTHER; note = 2'-O-methylcytidine with a 3'-phosphorothioate linkage
  modified_base 23: mod_base = cm
tcagccgatgctgctgtgccacc

SEQ ID NO: 156 - RNA, 23 nt, synthetic construct
  source 1..23: mol_type = other RNA
  modified_base 1: mod_base = OTHER; note = 2'-O-methyluridine with a 3'-phosphorothioate linkage and a 5'-phosphate substitution
  modified_base 2: mod_base = OTHER; note = 2'-fluorocytidine with a 3'-phosphorothioate linkage
  modified_base 3: mod_base = gm
  modified_base 4: mod_base = OTHER; note = 2'-O-methyladenosine
  modified_base 5: mod_base = OTHER; note = 2'-fluorouridine
  modified_base 6: mod_base = gm
  modified_base 7: mod_base = OTHER; note = 2'-fluorocytidine
  modified_base 8: mod_base = um
  modified_base 9: mod_base = gm
  modified_base 10: mod_base = cm
  modified_base 11: mod_base = um
  modified_base 12: mod_base = gm
  modified_base 13: mod_base = um
  modified_base 14: mod_base = OTHER; note = 2'-fluoroguanosine
  modified_base 15: mod_base = cm
  modified_base 16: mod_base = OTHER; note = 2'-fluorocytidine
  modified_base 17: mod_base = OTHER; note = 2'-O-methyladenosine
  modified_base 18: mod_base = cm
  modified_base 19: mod_base = cm
  modified_base 20: mod_base = OTHER; note = 2'-O-methyladenosine
  modified_base 21: mod_base = OTHER; note = 2'-O-methyluridine with a 3'-phosphorothioate linkage
  modified_base 22: mod_base = OTHER; note = 2'-O-methylcytidine with a 3'-phosphorothioate linkage
  modified_base 23: mod_base = um
tcgatgctgctgtgccaccatct

SEQ ID NO: 157 - RNA, 23 nt, synthetic construct
  source 1..23: mol_type = other RNA
  modified_base 1: mod_base = OTHER; note = 2'-O-methyluridine with a 3'-phosphorothioate linkage and a 5'-phosphate substitution
  modified_base 2: mod_base = OTHER; note = 2'-fluorocytidine with a 3'-phosphorothioate linkage
  modified_base 3: mod_base = cm
  modified_base 4: mod_base = um
  modified_base 5: mod_base = OTHER; note = 2'-fluorouridine
  modified_base 6: mod_base = um
  modified_base 7: mod_base = OTHER; note = 2'-fluoroadenosine
  modified_base 8: mod_base = OTHER; note = 2'-O-methyladenosine
  modified_base 9: mod_base = gm
  modified_base 10: mod_base = OTHER; note = 2'-O-methyladenosine
  modified_base 11: mod_base = cm
  modified_base 12: mod_base = cm
  modified_base 13: mod_base = um
  modified_base 14: mod_base = OTHER; note = 2'-fluorocytidine
  modified_base 15: mod_base = OTHER; note = 2'-O-methyladenosine
  modified_base 16: mod_base = OTHER; note = 2'-fluoroadenosine
  modified_base 17: mod_base = OTHER; note = 2'-O-methyladenosine
  modified_base 18: mod_base = um
  modified_base 19: mod_base = um
  modified_base 20: mod_base = cm
  modified_base 21: mod_base = OTHER; note = 2'-O-methyluridine with a 3'-phosphorothioate linkage
  modified_base 22: mod_base = OTHER; note = 2'-O-methylcytidine with a 3'-phosphorothioate linkage
  modified_base 23: mod_base = gm
tcctttaagacctcaaattctcg

SEQ ID NO: 158 - RNA, 23 nt, synthetic construct
  source 1..23: mol_type = other RNA
  modified_base 1: mod_base = OTHER; note = 2'-O-methyluridine with a 3'-phosphorothioate linkage and a 5'-phosphate substitution
  modified_base 2: mod_base = OTHER; note = 2'-fluoroadenosine with a 3'-phosphorothioate linkage
  modified_base 3: mod_base = um
  modified_base 4: mod_base = OTHER; note = 2'-O-methyladenosine
  modified_base 5: mod_base = OTHER; note = 2'-fluoroguanosine
  modified_base 6: mod_base = OTHER; note = 2'-O-methyladenosine
  modified_base 7: mod_base = OTHER; note = 2'-fluoroguanosine
  modified_base 8: mod_base = OTHER; note = 2'-O-methyladenosine
  modified_base 9: mod_base = cm
  modified_base 10: mod_base = cm
  modified_base 11: mod_base = cm
  modified_base 12: mod_base = OTHER; note = 2'-O-methyladenosine
  modified_base 13: mod_base = gm
  modified_base 14: mod_base = OTHER; note = 2'-fluoroguanosine
  modified_base 15: mod_base = cm
  modified_base 16: mod_base = OTHER; note = 2'-fluorouridine
  modified_base 17: mod_base = gm
  modified_base 18: mod_base = um
  modified_base 19: mod_base = um
  modified_base 20: mod_base = cm
  modified_base 21: mod_base = OTHER; note = 2'-O-methylcytidine with a 3'-phosphorothioate linkage
  modified_base 22: mod_base = OTHER; note = 2'-O-methyluridine with a 3'-phosphorothioate linkage
  modified_base 23: mod_base = gm
tatagagacccaggctgttcctg

SEQ ID NO: 159 - RNA, 23 nt, synthetic construct
  source 1..23: mol_type = other RNA
  modified_base 1: mod_base = OTHER; note = 2'-O-methyluridine with a 3'-phosphorothioate linkage and a 5'-phosphate substitution
  modified_base 2: mod_base = OTHER; note = 2'-fluorocytidine with a 3'-phosphorothioate linkage
  modified_base 3: mod_base = um
  modified_base 4: mod_base = gm
  modified_base 5: mod_base = OTHER; note = 2'-fluorocytidine
  modified_base 6: mod_base = um
  modified_base 7: mod_base = OTHER; note = 2'-fluorouridine
  modified_base 8: mod_base = gm
  modified_base 9: mod_base = um
  modified_base 10: mod_base = cm
  modified_base 11: mod_base = OTHER; note = 2'-O-methyladenosine
  modified_base 12: mod_base = gm
  modified_base 13: mod_base = cm
  modified_base 14: mod_base = OTHER; note = 2'-fluoroguanosine
  modified_base 15: mod_base = um
  modified_base 16: mod_base = OTHER; note = 2'-fluoroguanosine
  modified_base 17: mod_base = OTHER; note = 2'-O-methyladenosine
  modified_base 18: mod_base = gm
  modified_base 19: mod_base = cm
  modified_base 20: mod_base = cm
  modified_base 21: mod_base = OTHER; note = 2'-O-methyluridine with a 3'-phosphorothioate linkage
  modified_base 22: mod_base = OTHER; note = 2'-O-methyluridine with a 3'-phosphorothioate linkage
  modified_base 23: mod_base = um
tctgcttgtcagcgtgagccttt

SEQ ID NO: 160 - RNA, 23 nt, synthetic construct
  source 1..23: mol_type = other RNA
  modified_base 1: mod_base = OTHER; note = 2'-O-methyluridine with a 3'-phosphorothioate linkage and a 5'-phosphate substitution
  modified_base 2: mod_base = OTHER; note = 2'-fluoroguanosine with a 3'-phosphorothioate linkage
  modified_base 3: mod_base = cm
  modified_base 4: mod_base = OTHER; note = 2'-O-methyladenosine
  modified_base 5: mod_base = OTHER; note = 2'-fluoroguanosine
  modified_base 6: mod_base = cm
  modified_base 7: mod_base = OTHER; note = 2'-fluorocytidine
  modified_base 8: mod_base = gm
  modified_base 9: mod_base = OTHER; note = 2'-O-methyladenosine
  modified_base 10: mod_base = um
  modified_base 11: mod_base = gm
  modified_base 12: mod_base = cm
  modified_base 13: mod_base = um
  modified_base 14: mod_base = OTHER; note = 2'-fluoroguanosine
  modified_base 15: mod_base = cm
  modified_base 16: mod_base = OTHER; note = 2'-fluorouridine
  modified_base 17: mod_base = gm
  modified_base 18: mod_base = um
  modified_base 19: mod_base = gm
  modified_base 20: mod_base = cm
  modified_base 21: mod_base = OTHER; note = 2'-O-methylcytidine with a 3'-phosphorothioate linkage
  modified_base 22: mod_base = OTHER; note = 2'-O-methyladenosine with a 3'-phosphorothioate linkage
  modified_base 23: mod_base = cm
tgcagccgatgctgctgtgccac

SEQ ID NO: 161 - RNA, 23 nt, synthetic construct
  source 1..23: mol_type = other RNA
  modified_base 1: mod_base = OTHER; note = 2'-O-methyluridine with a 3'-phosphorothioate linkage and a 5'-phosphate substitution
  modified_base 2: mod_base = OTHER; note = 2'-fluoroguanosine with a 3'-phosphorothioate linkage
  modified_base 3: mod_base = um
  modified_base 4: mod_base = cm
  modified_base 5: mod_base = OTHER; note = 2'-fluorouridine
  modified_base 6: mod_base = cm
  modified_base 7: mod_base = OTHER; note = 2'-fluorocytidine
  modified_base 8: mod_base = OTHER; note = 2'-O-methyladenosine
  modified_base 9: mod_base = OTHER; note = 2'-O-methyladenosine
  modified_base 10: mod_base = cm
  modified_base 11: mod_base = OTHER; note = 2'-O-methyladenosine
  modified_base 12: mod_base = gm
  modified_base 13: mod_base = gm
  modified_base 14: mod_base = OTHER; note = 2'-fluorocytidine
  modified_base 15: mod_base = um
  modified_base 16: mod_base = OTHER; note = 2'-fluorouridine
  modified_base 17: mod_base = gm
  modified_base 18: mod_base = cm
  modified_base 19: mod_base = cm
  modified_base 20: mod_base = cm
  modified_base 21: mod_base = OTHER; note = 2'-O-methylguanosine with a 3'-phosphorothioate linkage
  modified_base 22: mod_base = OTHER; note = 2'-O-methyladenosine with a 3'-phosphorothioate linkage
  modified_base 23: mod_base = OTHER; note = 2'-O-methyladenosine
tgtctccaacaggcttgcccgaa

SEQ ID NO: 162 - RNA, 23 nt, synthetic construct
  source 1..23: mol_type = other RNA
  modified_base 1: mod_base = OTHER; note = 2'-O-methyluridine with a 3'-phosphorothioate linkage and a 5'-phosphate substitution
  modified_base 2: mod_base = OTHER; note = 2'-fluoroguanosine with a 3'-phosphorothioate linkage
  modified_base 3: mod_base = cm
  modified_base 4: mod_base = um
  modified_base 5: mod_base = OTHER; note = 2'-fluorouridine
  modified_base 6: mod_base = gm
  modified_base 7: mod_base = OTHER; note = 2'-fluorouridine
  modified_base 8: mod_base = cm
  modified_base 9: mod_base = OTHER; note = 2'-O-methyladenosine
  modified_base 10: mod_base = gm
  modified_base 11: mod_base = cm
  modified_base 12: mod_base = gm
  modified_base 13: mod_base = um
  modified_base 14: mod_base = OTHER; note = 2'-fluoroguanosine
  modified_base 15: mod_base = OTHER; note = 2'-O-methyladenosine
  modified_base 16: mod_base = OTHER; note = 2'-fluoroguanosine
  modified_base 17: mod_base = cm
  modified_base 18: mod_base = cm
  modified_base 19: mod_base = um
  modified_base 20: mod_base = um
  modified_base 21: mod_base = OTHER; note = 2'-O-methyluridine with a 3'-phosphorothioate linkage
  modified_base 22: mod_base = OTHER; note = 2'-O-methyladenosine with a 3'-phosphorothioate linkage
  modified_base 23: mod_base = OTHER; note = 2'-O-methyladenosine
tgcttgtcagcgtgagcctttaa

SEQ ID NO: 163 - RNA, 23 nt, synthetic construct
  source 1..23: mol_type = other RNA
  modified_base 1: mod_base = OTHER; note = 2'-O-methyluridine with a 3'-phosphorothioate linkage and a 5'-phosphate substitution
  modified_base 2: mod_base = OTHER; note = 2'-fluoroadenosine with a 3'-phosphorothioate linkage
  modified_base 3: mod_base = gm
  modified_base 4: mod_base = um
  modified_base 5: mod_base = OTHER; note = 2'-fluorouridine
  modified_base 6: mod_base = cm
  modified_base 7: mod_base = OTHER; note = 2'-fluorocytidine
  modified_base 8: mod_base = OTHER; note = 2'-O-methyladenosine
  modified_base 9: mod_base = um
  modified_base 10: mod_base = cm
  modified_base 11: mod_base = cm
  modified_base 12: mod_base = OTHER; note = 2'-O-methyladenosine
  modified_base 13: mod_base = gm
  modified_base 14: mod_base = OTHER; note = 2'-fluoroguanosine
  modified_base 15: mod_base = cm
  modified_base 16: mod_base = OTHER; note = 2'-fluoroadenosine
  modified_base 17: mod_base = gm
  modified_base 18: mod_base = OTHER; note = 2'-O-methyladenosine
  modified_base 19: mod_base = um
  modified_base 20: mod_base = um
  modified_base 21: mod_base = OTHER; note = 2'-O-methylcytidine with a 3'-phosphorothioate linkage
  modified_base 22: mod_base = OTHER; note = 2'-O-methyladenosine with a 3'-phosphorothioate linkage
  modified_base 23: mod_base = gm
tagttccatccaggcagattcag

SEQ ID NO: 164 - RNA, 23 nt, synthetic construct
  source 1..23: mol_type = other RNA
  modified_base 1: mod_base = OTHER; note = 2'-O-methyluridine with a 3'-phosphorothioate linkage and a 5'-phosphate substitution
  modified_base 2: mod_base = OTHER; note = 2'-fluoroguanosine with a 3'-phosphorothioate linkage
  modified_base 3: mod_base = gm
  modified_base 4: mod_base = cm
  modified_base 5: mod_base = OTHER; note = 2'-fluorouridine
  modified_base 6: mod_base = gm
  modified_base 7: mod_base = OTHER; note = 2'-fluoroadenosine
  modified_base 8: mod_base = um
  modified_base 9: mod_base = cm
  modified_base 10: mod_base = cm
  modified_base 11: mod_base = cm
  modified_base 12: mod_base = OTHER; note = 2'-O-methyladenosine
  modified_base 13: mod_base = gm
  modified_base 14: mod_base = OTHER; note = 2'-fluorouridine
  modified_base 15: mod_base = gm
  modified_base 16: mod_base = OTHER; note = 2'-fluoroadenosine
  modified_base 17: mod_base = OTHER; note = 2'-O-methyladenosine
  modified_base 18: mod_base = cm
  modified_base 19: mod_base = OTHER; note = 2'-O-methyladenosine
  modified_base 20: mod_base = gm
  modified_base 21: mod_base = OTHER; note = 2'-O-methylguanosine with a 3'-phosphorothioate linkage
  modified_base 22: mod_base = OTHER; note = 2'-O-methylcytidine with a 3'-phosphorothioate linkage
  modified_base 23: mod_base = OTHER; note = 2'-O-methyladenosine
tggctgatcccagtgaacaggca

SEQ ID NO: 165 - RNA, 23 nt, synthetic construct
  source 1..23: mol_type = other RNA
  modified_base 1: mod_base = OTHER; note = 2'-O-methyluridine with a 3'-phosphorothioate linkage and a 5'-phosphate substitution
  modified_base 2: mod_base = OTHER; note = 2'-fluorouridine with a 3'-phosphorothioate linkage
  modified_base 3: mod_base = gm
  modified_base 4: mod_base = cm
  modified_base 5: mod_base = OTHER; note = 2'-fluorocytidine
  modified_base 6: mod_base = OTHER; note = 2'-O-methyladenosine
  modified_base 7: mod_base = OTHER; note = 2'-fluorocytidine
  modified_base 8: mod_base = gm
  modified_base 9: mod_base = OTHER; note = 2'-O-methyladenosine
  modified_base 10: mod_base = cm
  modified_base 11: mod_base = um
  modified_base 12: mod_base = cm
  modified_base 13: mod_base = um
  modified_base 14: mod_base = OTHER; note = 2'-fluoroguanosine
  modified_base 15: mod_base = cm
  modified_base 16: mod_base = OTHER; note = 2'-fluorouridine
  modified_base 17: mod_base = um
  modified_base 18: mod_base = um
  modified_base 19: mod_base = OTHER; note = 2'-O-methyladenosine
  modified_base 20: mod_base = OTHER; note = 2'-O-methyladenosine
  modified_base 21: mod_base = OTHER; note = 2'-O-methyluridine with a 3'-phosphorothioate linkage
  modified_base 22: mod_base = OTHER; note = 2'-O-methylguanosine with a 3'-phosphorothioate linkage
  modified_base 23: mod_base = OTHER; note = 2'-O-methyladenosine
ttgccacgactctgctttaatga

SEQ ID NO: 166 - RNA, 23 nt, synthetic construct
  source 1..23: mol_type = other RNA
  modified_base 1: mod_base = OTHER; note = 2'-O-methyluridine with a 3'-phosphorothioate linkage and a 5'-phosphate substitution
  modified_base 2: mod_base = OTHER; note = 2'-fluorocytidine with a 3'-phosphorothioate linkage
  modified_base 3: mod_base = cm
  modified_base 4: mod_base = gm
  modified_base 5: mod_base = OTHER; note = 2'-fluoroadenosine
  modified_base 6: mod_base = um
  modified_base 7: mod_base = OTHER; note = 2'-fluoroguanosine
  modified_base 8: mod_base = cm
  modified_base 9: mod_base = um
  modified_base 10: mod_base = gm
  modified_base 11: mod_base = cm
  modified_base 12: mod_base = um
  modified_base 13: mod_base = gm
  modified_base 14: mod_base = OTHER; note = 2'-fluorouridine
  modified_base 15: mod_base = gm
  modified_base 16: mod_base = OTHER; note = 2'-fluorocytidine
  modified_base 17: mod_base = cm
  modified_base 18: mod_base = OTHER; note = 2'-O-methyladenosine
  modified_base 19: mod_base = cm
  modified_base 20: mod_base = cm
  modified_base 21: mod_base = OTHER; note = 2'-O-methyladenosine with a 3'-phosphorothioate linkage
  modified_base 22: mod_base = OTHER; note = 2'-O-methyluridine with a 3'-phosphorothioate linkage
  modified_base 23: mod_base = cm
tccgatgctgctgtgccaccatc

SEQ ID NO: 167 - RNA, 23 nt, synthetic construct
  source 1..23: mol_type = other RNA
  modified_base 1: mod_base = OTHER; note = 2'-O-methyluridine with a 3'-phosphorothioate linkage and a 5'-phosphate substitution
  modified_base 2: mod_base = OTHER; note = 2'-fluorocytidine with a 3'-phosphorothioate linkage
  modified_base 3: mod_base = OTHER; note = 2'-O-methyladenosine
  modified_base 4: mod_base = gm
  modified_base 5: mod_base = OTHER; note = 2'-fluorocytidine
  modified_base 6: mod_base = um
  modified_base 7: mod_base = OTHER; note = 2'-fluoroguanosine
  modified_base 8: mod_base = cm
  modified_base 9: mod_base = OTHER; note = 2'-O-methyladenosine
  modified_base 10: mod_base = gm
  modified_base 11: mod_base = OTHER; note = 2'-O-methyladenosine
  modified_base 12: mod_base = OTHER; note = 2'-O-methyladenosine
  modified_base 13: mod_base = um
  modified_base 14: mod_base = OTHER; note = 2'-fluoroadenosine
  modified_base 15: mod_base = um
  modified_base 16: mod_base = OTHER; note = 2'-fluorocytidine
  modified_base 17: mod_base = cm
  modified_base 18: mod_base = um
  modified_base 19: mod_base = cm
  modified_base 20: mod_base = cm
  modified_base 21: mod_base = OTHER; note = 2'-O-methyluridine with a 3'-phosphorothioate linkage
  modified_base 22: mod_base = OTHER; note = 2'-O-methylcytidine with a 3'-phosphorothioate linkage
  modified_base 23: mod_base = cm
tcagctgcagaatatcctcctcc

SEQ ID NO: 168 - RNA, 23 nt, synthetic construct
  source 1..23: mol_type = other RNA
  modified_base 1: mod_base = OTHER; note = 2'-O-methyluridine with a 3'-phosphorothioate linkage and a 5'-phosphate substitution
  modified_base 2: mod_base = OTHER; note = 2'-fluoroguanosine with a 3'-phosphorothioate linkage
  modified_base 3: mod_base = um
  modified_base 4: mod_base = gm
  modified_base 5: mod_base = OTHER; note = 2'-fluoroadenosine
  modified_base 6: mod_base = gm
  modified_base 7: mod_base = OTHER; note = 2'-fluorocytidine
  modified_base 8: mod_base = cm
  modified_base 9: mod_base = um
  modified_base 10: mod_base = um
  modified_base 11: mod_base = um
  modified_base 12: mod_base = OTHER; note = 2'-O-methyladenosine
  modified_base 13: mod_base = OTHER; note = 2'-O-methyladenosine
  modified_base 14: mod_base = OTHER; note = 2'-fluoroguanosine
  modified_base 15: mod_base = OTHER; note = 2'-O-methyladenosine
  modified_base 16: mod_base = OTHER; note = 2'-fluorocytidine
  modified_base 17: mod_base = cm
  modified_base 18: mod_base = um
  modified_base 19: mod_base = cm
  modified_base 20: mod_base = OTHER; note = 2'-O-methyladenosine
  modified_base 21: mod_base = OTHER; note = 2'-O-methyladenosine with a 3'-phosphorothioate linkage
  modified_base 22: mod_base = OTHER; note = 2'-O-methyladenosine with a 3'-phosphorothioate linkage
  modified_base 23: mod_base = um
tgtgagcctttaagacctcaaat

SEQ ID NO: 169 - RNA, 23 nt, synthetic construct
  source 1..23: mol_type = other RNA
  modified_base 1: mod_base = OTHER; note = 2'-O-methyluridine with a 3'-phosphorothioate linkage and a 5'-phosphate substitution
  modified_base 2: mod_base = OTHER; note = 2'-fluorocytidine with a 3'-phosphorothioate linkage
  modified_base 3: mod_base = um
  modified_base 4: mod_base = um
  modified_base 5: mod_base = OTHER; note = 2'-fluoroguanosine
  modified_base 6: mod_base = cm
  modified_base 7: mod_base = OTHER; note = 2'-fluorocytidine
  modified_base 8: mod_base = cm
  modified_base 9: mod_base = gm
  modified_base 10: mod_base = OTHER; note = 2'-O-methyladenosine
  modified_base 11: mod_base = OTHER; note = 2'-O-methyladenosine
  modified_base 12: mod_base = gm
  modified_base 13: mod_base = um
  modified_base 14: mod_base = OTHER; note = 2'-fluorouridine
  modified_base 15: mod_base = cm
  modified_base 16: mod_base = OTHER; note = 2'-fluorocytidine
  modified_base 17: mod_base = um
  modified_base 18: mod_base = gm
  modified_base 19: mod_base = gm
  modified_base 20: mod_base = gm
  modified_base 21: mod_base = OTHER; note = 2'-O-methylcytidine with a 3'-phosphorothioate linkage
  modified_base 22: mod_base = OTHER; note = 2'-O-methyluridine with a 3'-phosphorothioate linkage
  modified_base 23: mod_base = gm
tcttgcccgaagttcctgggctg

SEQ ID NO: 170 - RNA, 23 nt, synthetic construct
  source 1..23: mol_type = other RNA
  modified_base 1: mod_base = OTHER; note = 2'-O-methyluridine with a 3'-phosphorothioate linkage and a 5'-phosphate substitution
  modified_base 2: mod_base = OTHER; note = 2'-fluoroguanosine with a 3'-phosphorothioate linkage
  modified_base 3: mod_base = cm
  modified_base 4: mod_base = um
  modified_base 5: mod_base = OTHER; note = 2'-fluorocytidine
  modified_base 6: mod_base = cm
  modified_base 7: mod_base = OTHER; note = 2'-fluorouridine
  modified_base 8: mod_base = cm
  modified_base 9: mod_base = OTHER; note = 2'-O-methyladenosine
  modified_base 10: mod_base = gm
  modified_base 11: mod_base = cm
  modified_base 12: mod_base = um
  modified_base 13: mod_base = gm
  modified_base 14: mod_base = OTHER; note = 2'-fluoroguanosine
  modified_base 15: mod_base = OTHER; note = 2'-O-methyladenosine
  modified_base 16: mod_base = OTHER; note = 2'-fluorocytidine
  modified_base 17: mod_base = um
  modified_base 18: mod_base = um
  modified_base 19: mod_base = cm
  modified_base 20: mod_base = um
  modified_base 21: mod_base = OTHER; note = 2'-O-methyladenosine with a 3'-phosphorothioate linkage
  modified_base 22: mod_base = OTHER; note = 2'-O-methylguanosine with a 3'-phosphorothioate linkage
  modified_base 23: mod_base = cm
tgctcctcagctggacttctagc

SEQ ID NO: 171 - RNA, 23 nt, synthetic construct
  source 1..23: mol_type = other RNA
  modified_base 1: mod_base = OTHER; note = 2'-O-methyluridine with a 3'-phosphorothioate linkage and a 5'-phosphate substitution
  modified_base 2: mod_base = OTHER; note = 2'-fluorouridine with a 3'-phosphorothioate linkage
  modified_base 3: mod_base = gm
  modified_base 4: mod_base = OTHER; note = 2'-O-methyladenosine
  modified_base 5: mod_base = OTHER; note = 2'-fluorouridine
  modified_base 6: mod_base = cm
  modified_base 7: mod_base = OTHER; note = 2'-fluorocytidine
  modified_base 8: mod_base = cm
  modified_base 9: mod_base = OTHER; note = 2'-O-methyladenosine
  modified_base 10: mod_base = gm
  modified_base 11: mod_base = um
  modified_base 12: mod_base = gm
  modified_base 13: mod_base = OTHER; note = 2'-O-methyladenosine
  modified_base 14: mod_base = OTHER; note = 2'-fluoroadenosine
  modified_base 15: mod_base = cm
  modified_base 16: mod_base = OTHER; note = 2'-fluoroadenosine
  modified_base 17: mod_base = gm
  modified_base 18: mod_base = gm
  modified_base 19: mod_base = cm
  modified_base 20: mod_base = OTHER; note = 2'-O-methyladenosine
  modified_base 21: mod_base = OTHER; note = 2'-O-methylguanosine with a 3'-phosphorothioate linkage
  modified_base 22: mod_base = OTHER; note = 2'-O-methylcytidine with a 3'-phosphorothioate linkage
  modified_base 23: mod_base = um
ttgatcccagtgaacaggcagct

SEQ ID NO: 172 - RNA, 23 nt, synthetic construct
  source 1..23: mol_type = other RNA
  modified_base 1: mod_base = OTHER; note = 2'-O-methyluridine with a 3'-phosphorothioate linkage and a 5'-phosphate substitution
  modified_base 2: mod_base = OTHER; note = 2'-fluorocytidine with a 3'-phosphorothioate linkage
  modified_base 3: mod_base = um
  modified_base 4: mod_base = cm
  modified_base 5: mod_base = OTHER; note = 2'-fluoroadenosine
  modified_base 6: mod_base = gm
  modified_base 7: mod_base = OTHER; note = 2'-fluorouridine
  modified_base 8: mod_base = um
  modified_base 9: mod_base = cm
  modified_base 10: mod_base = cm
  modified_base 11: mod_base = OTHER; note = 2'-O-methyladenosine
  modified_base 12: mod_base = um
  modified_base 13: mod_base = cm
  modified_base 14: mod_base = OTHER; note = 2'-fluorocytidine
  modified_base 15: mod_base = OTHER; note = 2'-O-methyladenosine
  modified_base 16: mod_base = OTHER; note = 2'-fluoroguanosine
  modified_base 17: mod_base = gm
  modified_base 18: mod_base = cm
  modified_base 19: mod_base = OTHER; note = 2'-O-methyladenosine
  modified_base 20: mod_base = gm
  modified_base 21: mod_base = OTHER; note = 2'-O-methyladenosine with a 3'-phosphorothioate linkage
  modified_base 22: mod_base = OTHER; note = 2'-O-methyluridine with a 3'-phosphorothioate linkage
  modified_base 23: mod_base = um
tctcagttccatccaggcagatt

SEQ ID NO: 173 - RNA, 23 nt, synthetic construct
  source 1..23: mol_type = other RNA
  modified_base 1: mod_base = OTHER; note = 2'-O-methyluridine with a 3'-phosphorothioate linkage and a 5'-phosphate substitution
  modified_base 2: mod_base = OTHER; note = 2'-fluorouridine with a 3'-phosphorothioate linkage
  modified_base 3: mod_base = gm
  modified_base 4: mod_base = gm
  modified_base 5: mod_base = OTHER; note = 2'-fluorocytidine
  modified_base 6: mod_base = um
  modified_base 7: mod_base = OTHER; note = 2'-fluorocytidine
  modified_base 8: mod_base = um
  modified_base 9: mod_base = gm
  modified_base 10: mod_base = cm
  modified_base 11: mod_base = um
  modified_base 12: mod_base = um
  modified_base 13: mod_base = gm
  modified_base 14: mod_base = OTHER; note = 2'-fluorouridine
  modified_base 15: mod_base = cm
  modified_base 16: mod_base = OTHER; note = 2'-fluoroadenosine
  modified_base 17: mod_base = gm
  modified_base 18: mod_base = cm
  modified_base 19: mod_base = gm
  modified_base 20: mod_base = um
  modified_base 21: mod_base = OTHER; note = 2'-O-methylguanosine with a 3'-phosphorothioate linkage
  modified_base 22: mod_base = OTHER; note = 2'-O-methyladenosine with a 3'-phosphorothioate linkage
  modified_base 23: mod_base = gm
ttggctctgcttgtcagcgtgag

SEQ ID NO: 174 - RNA, 23 nt, synthetic construct
  source 1..23: mol_type = other RNA
  modified_base 1: mod_base = OTHER; note = 2'-O-methyluridine with a 3'-phosphorothioate linkage and a 5'-phosphate substitution
  modified_base 2: mod_base = OTHER; note = 2'-fluorouridine with a 3'-phosphorothioate linkage
  modified_base 3: mod_base = cm
  modified_base 4: mod_base = cm
  modified_base 5: mod_base = OTHER; note = 2'-fluorouridine
  modified_base 6: mod_base = cm
  modified_base 7: mod_base = OTHER; note = 2'-fluoroadenosine
  modified_base 8: mod_base = gm
  modified_base 9: mod_base = um
  modified_base 10: mod_base = um
  modified_base 11: mod_base = cm
  modified_base 12: mod_base = cm
  modified_base 13: mod_base = OTHER; note = 2'-O-methyladenosine
  modified_base 14: mod_base = OTHER; note = 2'-fluorouridine
  modified_base 15: mod_base = cm
  modified_base 16: mod_base = OTHER; note = 2'-fluorocytidine
  modified_base 17: mod_base = OTHER; note = 2'-O-methyladenosine
  modified_base 18: mod_base = gm
  modified_base 19: mod_base = gm
  modified_base 20: mod_base = cm
  modified_base 21: mod_base = OTHER; note = 2'-O-methyladenosine with a 3'-phosphorothioate linkage
  modified_base 22: mod_base = OTHER; note = 2'-O-methylguanosine with a 3'-phosphorothioate linkage
  modified_base 23: mod_base = OTHER; note = 2'-O-methyladenosine
ttcctcagttccatccaggcaga

SEQ ID NO: 175 - RNA, 23 nt, synthetic construct
  source 1..23: mol_type = other RNA
  modified_base 1: mod_base = OTHER; note = 2'-O-methyluridine with a 3'-phosphorothioate linkage and a 5'-phosphate substitution
  modified_base 2: mod_base = OTHER; note = 2'-fluoroguanosine with a 3'-phosphorothioate linkage
  modified_base 3: mod_base = OTHER; note = 2'-O-methyladenosine
  modified_base 4: mod_base = um
  modified_base 5: mod_base = OTHER; note = 2'-fluoroguanosine
  modified_base 6: mod_base = cm
  modified_base 7: mod_base = OTHER; note = 2'-fluorouridine
  modified_base 8: mod_base = gm
  modified_base 9: mod_base = cm
  modified_base 10: mod_base = um
  modified_base 11: mod_base = gm
  modified_base 12: mod_base = um
  modified_base 13: mod_base = gm
  modified_base 14: mod_base = OTHER; note = 2'-fluorocytidine
  modified_base 15: mod_base = cm
  modified_base 16: mod_base = OTHER; note = 2'-fluoroadenosine
  modified_base 17: mod_base = cm
  modified_base 18: mod_base = cm
  modified_base 19: mod_base = OTHER; note = 2'-O-methyladenosine
  modified_base 20: mod_base = um
  modified_base 21: mod_base = OTHER; note = 2'-O-methylcytidine with a 3'-phosphorothioate linkage
  modified_base 22: mod_base = OTHER; note = 2'-O-methyluridine with a 3'-phosphorothioate linkage
  modified_base 23: mod_base = cm
tgatgctgctgtgccaccatctc

SEQ ID NO: 176 - RNA, 23 nt, synthetic construct
  source 1..23: mol_type = other RNA
  modified_base 1: mod_base = OTHER; note = 2'-O-methyluridine with a 3'-phosphorothioate linkage and a 5'-phosphate substitution
  modified_base 2: mod_base = OTHER; note = 2'-fluorouridine with a 3'-phosphorothioate linkage
  modified_base 3: mod_base = cm
  modified_base 4: mod_base = OTHER; note = 2'-O-methyladenosine
  modified_base 5: mod_base = OTHER; note = 2'-fluoroguanosine
  modified_base 6: mod_base = cm
  modified_base 7: mod_base = OTHER; note = 2'-fluoroguanosine
  modified_base 8: mod_base = um
  modified_base 9: mod_base = gm
  modified_base 10: mod_base = OTHER; note = 2'-O-methyladenosine
  modified_base 11: mod_base = gm
  modified_base 12: mod_base = cm
  modified_base 13: mod_base = cm
  modified_base 14: mod_base = OTHER; note = 2'-fluorouridine
  modified_base 15: mod_base = um
  modified_base 16: mod_base = OTHER; note = 2'-fluorouridine
  modified_base 17: mod_base = OTHER; note = 2'-O-methyladenosine
  modified_base 18: mod_base = OTHER; note = 2'-O-methyladenosine
  modified_base 19: mod_base = gm
  modified_base 20: mod_base = OTHER; note = 2'-O-methyladenosine
  modified_base 21: mod_base = OTHER; note = 2'-O-methylcytidine with a 3'-phosphorothioate linkage
  modified_base 22: mod_base = OTHER; note = 2'-O-methylcytidine with a 3'-phosphorothioate linkage
  modified_base 23: mod_base = um
ttcagcgtgagcctttaagacct

SEQ ID NO: 177 - RNA, 23 nt, synthetic construct
  source 1..23: mol_type = other RNA
  modified_base 1: mod_base = OTHER; note = 2'-O-methyluridine with a 3'-phosphorothioate linkage and a 5'-phosphate substitution
  modified_base 2: mod_base = OTHER; note = 2'-fluorocytidine with a 3'-phosphorothioate linkage
  modified_base 3: mod_base = gm
  modified_base 4: mod_base = OTHER; note = 2'-O-methyladenosine
  modified_base 5: mod_base = OTHER; note = 2'-fluoroadenosine
  modified_base 6: mod_base = gm
  modified_base 7: mod_base = OTHER; note = 2'-fluorouridine
  modified_base 8: mod_base = um
  modified_base 9: mod_base = cm
  modified_base 10: mod_base = cm
  modified_base 11: mod_base = um
  modified_base 12: mod_base = gm
  modified_base 13: mod_base = gm
  modified_base 14: mod_base = OTHER; note = 2'-fluoroguanosine
  modified_base 15: mod_base = cm
  modified_base 16: mod_base = OTHER; note = 2'-fluorouridine
  modified_base 17: mod_base = gm
  modified_base 18: mod_base = cm
  modified_base 19: mod_base = OTHER; note = 2'-O-methyladenosine
  modified_base 20: mod_base = um
  modified_base 21: mod_base = OTHER; note = 2'-O-methylcytidine with a 3'-phosphorothioate linkage
  modified_base 22: mod_base = OTHER; note = 2'-O-methylcytidine with a 3'-phosphorothioate linkage
  modified_base 23: mod_base = cm
tcgaagttcctgggctgcatccc

SEQ ID NO: 178 - RNA, 23 nt, synthetic construct
  source 1..23: mol_type = other RNA
  modified_base 1: mod_base = OTHER; note = 2'-O-methyluridine with a 3'-phosphorothioate linkage and a 5'-phosphate substitution
  modified_base 2: mod_base = OTHER; note = 2'-fluorocytidine with a 3'-phosphorothioate linkage
  modified_base 3: mod_base = um
  modified_base 4: mod_base = um
  modified_base 5: mod_base = OTHER; note = 2'-fluorouridine
  modified_base 6: mod_base = OTHER; note = 2'-O-methyladenosine
  modified_base 7: mod_base = OTHER; note = 2'-fluoroadenosine
  modified_base 8: mod_base = gm
  modified_base 9: mod_base = OTHER; note = 2'-O-methyladenosine
  modified_base 10: mod_base = cm
  modified_base 11: mod_base = cm
  modified_base 12: mod_base = um
  modified_base 13: mod_base = cm
  modified_base 14: mod_base = OTHER; note = 2'-fluoroadenosine
  modified_base 15: mod_base = OTHER; note = 2'-O-methyladenosine
  modified_base 16: mod_base = OTHER; note = 2'-fluoroadenosine
  modified_base 17: mod_base = um
  modified_base 18: mod_base = um
  modified_base 19: mod_base = cm
  modified_base 20: mod_base = um
  modified_base 21: mod_base = OTHER; note = 2'-O-methylcytidine with a 3'-phosphorothioate linkage
  modified_base 22: mod_base = OTHER; note = 2'-O-methylguanosine with a 3'-phosphorothioate linkage
  modified_base 23: mod_base = gm
tctttaagacctcaaattctcgg

SEQ ID NO: 179 - RNA, 23 nt, synthetic construct
  source 1..23: mol_type = other RNA
  modified_base 1: mod_base = OTHER; note = 2'-O-methyluridine with a 3'-phosphorothioate linkage and a 5'-phosphate substitution
  modified_base 2: mod_base = OTHER; note = 2'-fluoroguanosine with a 3'-phosphorothioate linkage
  modified_base 3: mod_base = cm
  modified_base 4: mod_base = OTHER; note = 2'-O-methyladenosine
  modified_base 5: mod_base = OTHER; note = 2'-fluoroguanosine
  modified_base 6: mod_base = OTHER; note = 2'-O-methyladenosine
  modified_base 7: mod_base = OTHER; note = 2'-fluoroadenosine
  modified_base 8: mod_base = um
  modified_base 9: mod_base = OTHER; note = 2'-O-methyladenosine
  modified_base 10: mod_base = um
  modified_base 11: mod_base = cm
  modified_base 12: mod_base = cm
  modified_base 13: mod_base = um
  modified_base 14: mod_base = OTHER; note = 2'-fluorocytidine
  modified_base 15: mod_base = cm
  modified_base 16: mod_base = OTHER; note = 2'-fluorouridine
  modified_base 17: mod_base = cm
  modified_base 18: mod_base = cm
  modified_base 19: mod_base = OTHER; note = 2'-O-methyladenosine
  modified_base 20: mod_base = um
  modified_base 21: mod_base = OTHER; note = 2'-O-methylcytidine with a 3'-phosphorothioate linkage
  modified_base 22: mod_base = OTHER; note = 2'-O-methyluridine with a 3'-phosphorothioate linkage
  modified_base 23: mod_base = gm
tgcagaatatcctcctccatctg

SEQ ID NO: 180 - RNA, 23 nt, synthetic construct
  source 1..23: mol_type = other RNA
  modified_base 1: mod_base = OTHER; note = 2'-O-methyluridine with a 3'-phosphorothioate linkage and a 5'-phosphate substitution
  modified_base 2: mod_base = OTHER; note = 2'-fluoroguanosine with a 3'-phosphorothioate linkage
  modified_base 3: mod_base = cm
  modified_base 4: mod_base = um
  modified_base 5: mod_base = OTHER; note = 2'-fluoroguanosine
  modified_base 6: mod_base = um
  modified_base 7: mod_base = OTHER; note = 2'-fluorouridine
  modified_base 8: mod_base = cm
  modified_base 9: mod_base = cm
  modified_base 10: mod_base = um
  modified_base 11: mod_base = gm
  modified_base 12: mod_base = gm
  modified_base 13: mod_base = cm
  modified_base 14: mod_base = OTHER; note = 2'-fluorocytidine
  modified_base 15: mod_base = um
  modified_base 16: mod_base = OTHER; note = 2'-fluorouridine
  modified_base 17: mod_base = um
  modified_base 18: mod_base = gm
  modified_base 19: mod_base = um
  modified_base 20: mod_base = cm
  modified_base 21: mod_base = OTHER; note = 2'-O-methyladenosine with a 3'-phosphorothioate linkage
  modified_base 22: mod_base = OTHER; note = 2'-O-methylguanosine with a 3'-phosphorothioate linkage
  modified_base 23: mod_base = cm
tgctgttcctggcctttgtcagc

SEQ ID NO: 181 - RNA, 23 nt, synthetic construct
  source 1..23: mol_type = other RNA
  modified_base 1: mod_base = OTHER; note = 2'-O-methyluridine with a 3'-phosphorothioate linkage and a 5'-phosphate substitution
  modified_base 2: mod_base = OTHER; note = 2'-fluoroguanosine with a 3'-phosphorothioate linkage
  modified_base 3: mod_base = cm
  modified_base 4: mod_base = um
  modified_base 5: mod_base = OTHER; note = 2'-fluorocytidine
  modified_base 6: mod_base = um
  modified_base 7: mod_base = OTHER; note = 2'-fluoroguanosine
  modified_base 8: mod_base = cm
  modified_base 9: mod_base = um
  modified_base 10: mod_base = um
  modified_base 11: mod_base = gm
  modified_base 12: mod_base = um
  modified_base 13: mod_base = cm
  modified_base 14: mod_base = OTHER; note = 2'-fluoroadenosine
  modified_base 15: mod_base = gm
  modified_base 16: mod_base = OTHER; note = 2'-fluorocytidine
  modified_base 17: mod_base = gm
  modified_base 18: mod_base = um
  modified_base 19: mod_base = gm
  modified_base 20: mod_base = OTHER; note = 2'-O-methyladenosine
  modified_base 21: mod_base = OTHER; note = 2'-O-methylguanosine with a 3'-phosphorothioate linkage
  modified_base 22: mod_base = OTHER; note = 2'-O-methylcytidine with a 3'-phosphorothioate linkage
  modified_base 23: mod_base = cm
tgctctgcttgtcagcgtgagcc

SEQ ID NO: 182 - RNA, 23 nt, synthetic construct
  source 1..23: mol_type = other RNA
  modified_base 1: mod_base = OTHER; note = 2'-O-methyluridine with a 3'-phosphorothioate linkage and a 5'-phosphate substitution
  modified_base 2: mod_base = OTHER; note = 2'-fluorocytidine with a 3'-phosphorothioate linkage
  modified_base 3: mod_base = cm
  modified_base 4: mod_base = OTHER; note = 2'-O-methyladenosine
  modified_base 5: mod_base = OTHER; note = 2'-fluorouridine
  modified_base 6: mod_base = cm
  modified_base 7: mod_base = OTHER; note = 2'-fluorocytidine
  modified_base 8: mod_base = OTHER; note = 2'-O-methyladenosine
  modified_base 9: mod_base = gm
  modified_base 10: mod_base = gm
  modified_base 11: mod_base = cm
  modified_base 12: mod_base = OTHER; note = 2'-O-methyladenosine
  modified_base 13: mod_base = gm
  modified_base 14: mod_base = OTHER; note = 2'-fluoroadenosine
  modified_base 15: mod_base = um
  modified_base 16: mod_base = OTHER; note = 2'-fluorouridine
  modified_base 17: mod_base = cm
  modified_base 18: mod_base = OTHER; note = 2'-O-methyladenosine
  modified_base 19: mod_base = gm
  modified_base 20: mod_base = gm
  modified_base 21: mod_base = OTHER; note = 2'-O-methylcytidine with a 3'-phosphorothioate linkage
  modified_base 22: mod_base = OTHER; note = 2'-O-methyluridine with a 3'-phosphorothioate linkage
  modified_base 23: mod_base = gm
tccatccaggcagattcaggctg

SEQ ID NO: 183 - RNA, 23 nt, synthetic construct
  source 1..23: mol_type = other RNA
  modified_base 1: mod_base = OTHER; note = 2'-O-methyluridine with a 3'-phosphorothioate linkage and a 5'-phosphate substitution
  modified_base 2: mod_base = OTHER; note = 2'-fluoroguanosine with a 3'-phosphorothioate linkage
  modified_base 3: mod_base = cm
  modified_base 4: mod_base = cm
  modified_base 5: mod_base = OTHER; note = 2'-fluoroadenosine
  modified_base 6: mod_base = um
  modified_base 7: mod_base = OTHER; note = 2'-fluoroadenosine
  modified_base 8: mod_base = gm
  modified_base 9: mod_base = OTHER; note = 2'-O-methyladenosine
  modified_base 10: mod_base = gm
  modified_base 11: mod_base = OTHER; note = 2'-O-methyladenosine
  modified_base 12: mod_base = cm
  modified_base 13: mod_base = cm
  modified_base 14: mod_base = OTHER; note = 2'-fluorocytidine
  modified_base 15: mod_base = OTHER; note = 2'-O-methyladenosine
  modified_base 16: mod_base = OTHER; note = 2'-fluoroguanosine
  modified_base 17: mod_base = gm
  modified_base 18: mod_base = cm
  modified_base 19: mod_base = um
  modified_base 20: mod_base = gm
  modified_base 21: mod_base = OTHER; note = 2'-O-methyluridine with a 3'-phosphorothioate linkage
  modified_base 22: mod_base = OTHER; note = 2'-O-methyluridine with a 3'-phosphorothioate linkage
  modified_base 23: mod_base = cm
tgccatagagacccaggctgttc

SEQ ID NO: 184 - RNA, 23 nt, synthetic construct
  source 1..23: mol_type = other RNA
  modified_base 1: mod_base = OTHER; note = 2'-O-methyluridine with a 3'-phosphorothioate linkage and a 5'-phosphate substitution
  modified_base 2: mod_base = OTHER; note = 2'-fluoroadenosine with a 3'-phosphorothioate linkage
  modified_base 3: mod_base = gm
  modified_base 4: mod_base = gm
  modified_base 5: mod_base = OTHER; note = 2'-fluorocytidine
  modified_base 6: mod_base = um
  modified_base 7: mod_base = OTHER; note = 2'-fluorouridine
  modified_base 8: mod_base = gm
  modified_base 9: mod_base = cm
  modified_base 10: mod_base = cm
  modified_base 11: mod_base = cm
  modified_base 12: mod_base = gm
  modified_base 13: mod_base = OTHER; note = 2'-O-methyladenosine
  modified_base 14: mod_base = OTHER; note = 2'-fluoroadenosine
  modified_base 15: mod_base = gm
  modified_base 16: mod_base = OTHER; note = 2'-fluorouridine
  modified_base 17: mod_base = um
  modified_base 18: mod_base = cm
  modified_base 19: mod_base = cm
  modified_base 20: mod_base = um
  modified_base 21: mod_base = OTHER; note = 2'-O-methylguanosine with a 3'-phosphorothioate linkage
  modified_base 22: mod_base = OTHER; note = 2'-O-methylguanosine with a 3'-phosphorothioate linkage
  modified_base 23: mod_base = gm
taggcttgcccgaagttcctggg

SEQ ID NO: 185 - RNA, 23 nt, synthetic construct
  source 1..23: mol_type = other RNA
  modified_base 1: mod_base = OTHER; note = 2'-O-methyluridine with a 3'-phosphorothioate linkage and a 5'-phosphate substitution
  modified_base 2: mod_base = OTHER; note = 2'-fluoroguanosine with a 3'-phosphorothioate linkage
  modified_base 3: mod_base = gm
  modified_base 4: mod_base = cm
  modified_base 5: mod_base = OTHER; note = 2'-fluoroguanosine
  modified_base 6: mod_base = um
  modified_base 7: mod_base = OTHER; note = 2'-fluoroguanosine
  modified_base 8: mod_base = gm
  modified_base 9: mod_base = OTHER; note = 2'-O-methyladenosine
  modified_base 10: mod_base = OTHER; note = 2'-O-methyladenosine
  modified_base 11: mod_base = gm
  modified_base 12: mod_base = um
  modified_base 13: mod_base = gm
  modified_base 14: mod_base = OTHER; note = 2'-fluorouridine
  modified_base 15: mod_base = um
  modified_base 16: mod_base = OTHER; note = 2'-fluorocytidine
  modified_base 17: mod_base = cm
  modified_base 18: mod_base = um
  modified_base 19: mod_base = um
  modified_base 20: mod_base = gm
  modified_base 21: mod_base = OTHER; note = 2'-O-methylcytidine with a 3'-phosphorothioate linkage
  modified_base 22: mod_base = OTHER; note = 2'-O-methyladenosine with a 3'-phosphorothioate linkage
  modified_base 23: mod_base = gm
tggcgtggaagtgttccttgcag

SEQ ID NO: 186 - RNA, 23 nt, synthetic construct
  source 1..23: mol_type = other RNA
  modified_base 1: mod_base = OTHER; note = 2'-O-methyluridine with a 3'-phosphorothioate linkage and a 5'-phosphate substitution
  modified_base 2: mod_base = OTHER; note = 2'-fluorouridine with a 3'-phosphorothioate linkage
  modified_base 3: mod_base = gm
  modified_base 4: mod_base = OTHER; note = 2'-O-methyladenosine
  modified_base 5: mod_base = OTHER; note = 2'-fluoroguanosine
  modified_base 6: mod_base = cm
  modified_base 7: mod_base = OTHER; note = 2'-fluorocytidine
  modified_base 8: mod_base = um
  modified_base 9: mod_base = um
  modified_base 10: mod_base = um
  modified_base 11: mod_base = OTHER; note = 2'-O-methyladenosine
  modified_base 12: mod_base = OTHER; note = 2'-O-methyladenosine
  modified_base 13: mod_base = gm
  modified_base 14: mod_base = OTHER; note = 2'-fluoroadenosine
  modified_base 15: mod_base = cm
  modified_base 16: mod_base = OTHER; note = 2'-fluorocytidine
  modified_base 17: mod_base = um
  modified_base 18: mod_base = cm
  modified_base 19: mod_base = OTHER; note = 2'-O-methyladenosine
  modified_base 20: mod_base = OTHER; note = 2'-O-methyladenosine
  modified_base 21: mod_base = OTHER; note = 2'-O-methyladenosine with a 3'-phosphorothioate linkage
  modified_base 22: mod_base = OTHER; note = 2'-O-methyluridine with a 3'-phosphorothioate linkage
  modified_base 23: mod_base = um
ttgagcctttaagacctcaaatt

SEQ ID NO: 187 - RNA, 23 nt, synthetic construct
  source 1..23: mol_type = other RNA
  modified_base 1: mod_base = OTHER; note = 2'-O-methyluridine with a 3'-phosphorothioate linkage and a 5'-phosphate substitution
  modified_base 2: mod_base = OTHER; note = 2'-fluoroguanosine with a 3'-phosphorothioate linkage
  modified_base 3: mod_base = cm
  modified_base 4: mod_base = OTHER; note = 2'-O-methyladenosine
  modified_base 5: mod_base = OTHER; note = 2'-fluorocytidine
  modified_base 6: mod_base = cm
  modified_base 7: mod_base = OTHER; note = 2'-fluorouridine
  modified_base 8: mod_base = um
  modified_base 9: mod_base = cm
  modified_base 10: mod_base = um
  modified_base 11: mod_base = gm
  modified_base 12: mod_base = um
  modified_base 13: mod_base = gm
  modified_base 14: mod_base = OTHER; note = 2'-fluorocytidine
  modified_base 15: mod_base = cm
  modified_base 16: mod_base = OTHER; note = 2'-fluorouridine
  modified_base 17: mod_base = gm
  modified_base 18: mod_base = gm
  modified_base 19: mod_base = gm
  modified_base 20: mod_base = cm
  modified_base 21: mod_base = OTHER; note = 2'-O-methylcytidine with a 3'-phosphorothioate linkage
  modified_base 22: mod_base = OTHER; note = 2'-O-methyladenosine with a 3'-phosphorothioate linkage
  modified_base 23: mod_base = cm
tgcaccttctgtgcctgggccac

SEQ ID NO: 188 - RNA, 23 nt, synthetic construct
  source 1..23: mol_type = other RNA
  modified_base 1: mod_base = OTHER; note = 2'-O-methyluridine with a 3'-phosphorothioate linkage and a 5'-phosphate substitution
  modified_base 2: mod_base = OTHER; note = 2'-fluoroguanosine with a 3'-phosphorothioate linkage
  modified_base 3: mod_base = OTHER; note = 2'-O-methyladenosine
  modified_base 4: mod_base = OTHER; note = 2'-O-methyladenosine
  modified_base 5: mod_base = OTHER; note = 2'-fluorouridine
  modified_base 6: mod_base = OTHER; note = 2'-O-methyladenosine
  modified_base 7: mod_base = OTHER; note = 2'-fluorouridine
  modified_base 8: mod_base = cm
  modified_base 9: mod_base = cm
  modified_base 10: mod_base = um
  modified_base 11: mod_base = cm
  modified_base 12: mod_base = cm
  modified_base 13: mod_base = um
  modified_base 14: mod_base = OTHER; note = 2'-fluorocytidine
  modified_base 15: mod_base = cm
  modified_base 16: mod_base = OTHER; note = 2'-fluoroadenosine
  modified_base 17: mod_base = um
  modified_base 18: mod_base = cm
  modified_base 19: mod_base = um
  modified_base 20: mod_base = gm
  modified_base 21: mod_base = OTHER; note = 2'-O-methyladenosine with a 3'-phosphorothioate linkage
  modified_base 22: mod_base = OTHER; note = 2'-O-methylguanosine with a 3'-phosphorothioate linkage
  modified_base 23: mod_base = um
tgaatatcctcctccatctgagt

SEQ ID NO: 189 - RNA, 23 nt, synthetic construct
  source 1..23: mol_type = other RNA
  modified_base 1: mod_base = OTHER; note = 2'-O-methyluridine with a 3'-phosphorothioate linkage and a 5'-phosphate substitution
  modified_base 2: mod_base = OTHER; note = 2'-fluoroguanosine with a 3'-phosphorothioate linkage
  modified_base 3: mod_base = gm
  modified_base 4: mod_base = cm
  modified_base 5: mod_base = OTHER; note = 2'-fluorouridine
  modified_base 6: mod_base = um
  modified_base 7: mod_base = OTHER; note = 2'-fluoroguanosine
  modified_base 8: mod_base = cm
  modified_base 9: mod_base = cm
  modified_base 10: mod_base = cm
  modified_base 11: mod_base = gm
  modified_base 12: mod_base = OTHER; note = 2'-O-methyladenosine
  modified_base 13: mod_base = OTHER; note = 2'-O-methyladenosine
  modified_base 14: mod_base = OTHER; note = 2'-fluoroguanosine
  modified_base 15: mod_base = um
  modified_base 16: mod_base = OTHER; note = 2'-fluorouridine
  modified_base 17: mod_base = cm
  modified_base 18: mod_base = cm
  modified_base 19: mod_base = um
  modified_base 20: mod_base = gm
  modified_base 21: mod_base = OTHER; note = 2'-O-methylguanosine with a 3'-phosphorothioate linkage
  modified_base 22: mod_base = OTHER; note = 2'-O-methylguanosine with a 3'-phosphorothioate linkage
  modified_base 23: mod_base = cm
tggcttgcccgaagttcctgggc

SEQ ID NO: 190 - RNA, 23 nt, synthetic construct
  source 1..23: mol_type = other RNA
  modified_base 1: mod_base = OTHER; note = 2'-O-methyluridine with a 3'-phosphorothioate linkage and a 5'-phosphate substitution
  modified_base 2: mod_base = OTHER; note = 2'-fluorouridine with a 3'-phosphorothioate linkage
  modified_base 3: mod_base = gm
  modified_base 4: mod_base = cm
  modified_base 5: mod_base = OTHER; note = 2'-fluorocytidine
  modified_base 6: mod_base = cm
  modified_base 7: mod_base = OTHER; note = 2'-fluoroguanosine
  modified_base 8: mod_base = OTHER; note = 2'-O-methyladenosine
  modified_base 9: mod_base = OTHER; note = 2'-O-methyladenosine
  modified_base 10: mod_base = gm
  modified_base 11: mod_base = um
  modified_base 12: mod_base = um
  modified_base 13: mod_base = cm
  modified_base 14: mod_base = OTHER; note = 2'-fluorocytidine
  modified_base 15: mod_base = um
  modified_base 16: mod_base = OTHER; note = 2'-fluoroguanosine
  modified_base 17: mod_base = gm
  modified_base 18: mod_base = gm
  modified_base 19: mod_base = cm
  modified_base 20: mod_base = um
  modified_base 21: mod_base = OTHER; note = 2'-O-methylguanosine with a 3'-phosphorothioate linkage
  modified_base 22: mod_base = OTHER; note = 2'-O-methylcytidine with a 3'-phosphorothioate linkage
  modified_base 23: mod_base = OTHER; note = 2'-O-methyladenosine
ttgcccgaagttcctgggctgca

SEQ ID NO: 191 - RNA, 23 nt, synthetic construct
  source 1..23: mol_type = other RNA
  modified_base 1: mod_base = OTHER; note = 2'-O-methyluridine with a 3'-phosphorothioate linkage and a 5'-phosphate substitution
  modified_base 2: mod_base = OTHER; note = 2'-fluorocytidine with a 3'-phosphorothioate linkage
  modified_base 3: mod_base = cm
  modified_base 4: mod_base = OTHER; note = 2'-O-methyladenosine
  modified_base 5: mod_base = OTHER; note = 2'-fluoroguanosine
  modified_base 6: mod_base = gm
  modified_base 7: mod_base = OTHER; note = 2'-fluorocytidine
  modified_base 8: mod_base = OTHER; note = 2'-O-methyladenosine
  modified_base 9: mod_base = gm
  modified_base 10: mod_base = OTHER; note = 2'-O-methyladenosine
  modified_base 11: mod_base = um
  modified_base 12: mod_base = um
  modified_base 13: mod_base = cm
  modified_base 14: mod_base = OTHER; note = 2'-fluoroadenosine
  modified_base 15: mod_base = gm
  modified_base 16: mod_base = OTHER; note = 2'-fluoroguanosine
  modified_base 17: mod_base = cm
  modified_base 18: mod_base = um
  modified_base 19: mod_base = gm
  modified_base 20: mod_base = gm
  modified_base 21: mod_base = OTHER; note = 2'-O-methylguanosine with a 3'-phosphorothioate linkage
  modified_base 22: mod_base = OTHER; note = 2'-O-methyladenosine with a 3'-phosphorothioate linkage
  modified_base 23: mod_base = gm
tccaggcagattcaggctgggag

SEQ ID NO: 192 - RNA, 23 nt, synthetic construct
  source 1..23: mol_type = other RNA
  modified_base 1: mod_base = OTHER; note = 2'-O-methyluridine with a 3'-phosphorothioate linkage and a 5'-phosphate substitution
  modified_base 2: mod_base = OTHER; note = 2'-fluoroguanosine with a 3'-phosphorothioate linkage
  modified_base 3: mod_base = cm
  modified_base 4: mod_base = um
  modified_base 5: mod_base = OTHER; note = 2'-fluorouridine
  modified_base 6: mod_base = gm
  modified_base 7: mod_base = OTHER; note = 2'-fluorocytidine
  modified_base 8: mod_base = cm
  modified_base 9: mod_base = cm
  modified_base 10: mod_base = gm
  modified_base 11: mod_base = OTHER; note = 2'-O-methyladenosine
  modified_base 12: mod_base = OTHER; note = 2'-O-methyladenosine
  modified_base 13: mod_base = gm
  modified_base 14: mod_base = OTHER; note = 2'-fluorouridine
  modified_base 15: mod_base = um
  modified_base 16: mod_base = OTHER; note = 2'-fluorocytidine
  modified_base 17: mod_base = cm
  modified_base 18: mod_base = um
  modified_base 19: mod_base = gm
  modified_base 20: mod_base = gm
  modified_base 21: mod_base = OTHER; note = 2'-O-methylguanosine with a 3'-phosphorothioate linkage
  modified_base 22: mod_base = OTHER; note = 2'-O-methylcytidine with a 3'-phosphorothioate linkage
  modified_base 23: mod_base = um
tgcttgcccgaagttcctgggct

SEQ ID NO: 193 - RNA, 23 nt, synthetic construct
  source 1..23: mol_type = other RNA
  modified_base 1: mod_base = OTHER; note = 2'-O-methyluridine with a 3'-phosphorothioate linkage and a 5'-phosphate substitution
  modified_base 2: mod_base = OTHER; note = 2'-fluorouridine with a 3'-phosphorothioate linkage
  modified_base 3: mod_base = gm
  modified_base 4: mod_base = gm
  modified_base 5: mod_base = OTHER; note = 2'-fluoroadenosine
  modified_base 6: mod_base = um
  modified_base 7: mod_base = OTHER; note = 2'-fluorocytidine
  modified_base 8: mod_base = um
  modified_base 9: mod_base = gm
  modified_base 10: mod_base = um
  modified_base 11: mod_base = cm
  modified_base 12: mod_base = gm
  modified_base 13: mod_base = cm
  modified_base 14: mod_base = OTHER; note = 2'-fluoroadenosine
  modified_base 15: mod_base = gm
  modified_base 16: mod_base = OTHER; note = 2'-fluorocytidine
  modified_base 17: mod_base = cm
  modified_base 18: mod_base = gm
  modified_base 19: mod_base = OTHER; note = 2'-O-methyladenosine
  modified_base 20: mod_base = um
  modified_base 21: mod_base = OTHER; note = 2'-O-methylguanosine with a 3'-phosphorothioate linkage
  modified_base 22: mod_base = OTHER; note = 2'-O-methylcytidine with a 3'-phosphorothioate linkage
  modified_base 23: mod_base = um
ttggatctgtcgcagccgatgct

SEQ ID NO: 194 - RNA, 23 nt, synthetic construct
  source 1..23: mol_type = other RNA
  modified_base 1: mod_base = OTHER; note = 2'-O-methyluridine with a 3'-phosphorothioate linkage and a 5'-phosphate substitution
  modified_base 2: mod_base = OTHER; note = 2'-fluoroadenosine with a 3'-phosphorothioate linkage
  modified_base 3: mod_base = gm
  modified_base 4: mod_base = cm
  modified_base 5: mod_base = OTHER; note = 2'-fluorocytidine
  modified_base 6: mod_base = gm
  modified_base 7: mod_base = OTHER; note = 2'-fluoroadenosine
  modified_base 8: mod_base = um
  modified_base 9: mod_base = gm
  modified_base 10: mod_base = cm
  modified_base 11: mod_base = um
  modified_base 12: mod_base = gm
  modified_base 13: mod_base = cm
  modified_base 14: mod_base = OTHER; note = 2'-fluorouridine
  modified_base 15: mod_base = gm
  modified_base 16: mod_base = OTHER; note = 2'-fluorouridine
  modified_base 17: mod_base = gm
  modified_base 18: mod_base = cm
  modified_base 19: mod_base = cm
  modified_base 20: mod_base = OTHER; note = 2'-O-methyladenosine
  modified_base 21: mod_base = OTHER; note = 2'-O-methylcytidine with a 3'-phosphorothioate linkage
  modified_base 22: mod_base = OTHER; note = 2'-O-methylcytidine with a 3'-phosphorothioate linkage
  modified_base 23: mod_base = OTHER; note = 2'-O-methyladenosine
tagccgatgctgctgtgccacca

SEQ ID NO: 195 - RNA, 23 nt, synthetic construct
  source 1..23: mol_type = other RNA
  modified_base 1: mod_base = OTHER; note = 2'-O-methyluridine with a 3'-phosphorothioate linkage and a 5'-phosphate substitution
  modified_base 2: mod_base = OTHER; note = 2'-fluoroguanosine with a 3'-phosphorothioate linkage
  modified_base 3: mod_base = cm
  modified_base 4: mod_base = OTHER; note = 2'-O-methyladenosine
  modified_base 5: mod_base = OTHER; note = 2'-fluorocytidine
  modified_base 6: mod_base = gm
  modified_base 7: mod_base = OTHER; note = 2'-fluorouridine
  modified_base 8: mod_base = gm
  modified_base 9: mod_base = gm
  modified_base 10: mod_base = cm
  modified_base 11: mod_base = cm
  modified_base 12: mod_base = um
  modified_base 13: mod_base = gm
  modified_base 14: mod_base = OTHER; note = 2'-fluorouridine
  modified_base 15: mod_base = gm
  modified_base 16: mod_base = OTHER; note = 2'-fluoroadenosine
  modified_base 17: mod_base = gm
  modified_base 18: mod_base = gm
  modified_base 19: mod_base = gm
  modified_base 20: mod_base = cm
  modified_base 21: mod_base = OTHER; note = 2'-O-methylcytidine with a 3'-phosphorothioate linkage
  modified_base 22: mod_base = OTHER; note = 2'-O-methylcytidine with a 3'-phosphorothioate linkage
  modified_base 23: mod_base = OTHER; note = 2'-O-methyladenosine
tgcacgtggcctgtgagggccca

SEQ ID NO: 196 - RNA, 23 nt, synthetic construct
  source 1..23: mol_type = other RNA
  modified_base 1: mod_base = OTHER; note = 2'-O-methyluridine with a 3'-phosphorothioate linkage and a 5'-phosphate substitution
  modified_base 2: mod_base = OTHER; note = 2'-fluorocytidine with a 3'-phosphorothioate linkage
  modified_base 3: mod_base = OTHER; note = 2'-O-methyladenosine
  modified_base 4: mod_base = OTHER; note = 2'-O-methyladenosine
  modified_base 5: mod_base = OTHER; note = 2'-fluorocytidine
  modified_base 6: mod_base = OTHER; note = 2'-O-methyladenosine
  modified_base 7: mod_base = OTHER; note = 2'-fluoroguanosine
  modified_base 8: mod_base = gm
  modified_base 9: mod_base = cm
  modified_base 10: mod_base = um
  modified_base 11: mod_base = um
  modified_base 12: mod_base = gm
  modified_base 13: mod_base = cm
  modified_base 14: mod_base = OTHER; note = 2'-fluorocytidine
  modified_base 15: mod_base = cm
  modified_base 16: mod_base = OTHER; note = 2'-fluoroguanosine
  modified_base 17: mod_base = OTHER; note = 2'-O-methyladenosine
  modified_base 18: mod_base = OTHER; note = 2'-O-methyladenosine
  modified_base 19: mod_base = gm
  modified_base 20: mod_base = um
  modified_base 21: mod_base = OTHER; note = 2'-O-methyluridine with a 3'-phosphorothioate linkage
  modified_base 22: mod_base = OTHER; note = 2'-O-methylcytidine with a 3'-phosphorothioate linkage
  modified_base 23: mod_base = cm
tcaacaggcttgcccgaagttcc

SEQ ID NO: 197 - RNA, 23 nt, synthetic construct
  source 1..23: mol_type = other RNA
  modified_base 1: mod_base = OTHER; note = 2'-O-methyluridine with a 3'-phosphorothioate linkage and a 5'-phosphate substitution
  modified_base 2: mod_base = OTHER; note = 2'-fluorocytidine with a 3'-phosphorothioate linkage
  modified_base 3: mod_base = um
  modified_base 4: mod_base = um
  modified_base 5: mod_base = OTHER; note = 2'-fluoroguanosine
  modified_base 6: mod_base = um
  modified_base 7: mod_base = OTHER; note = 2'-fluorocytidine
  modified_base 8: mod_base = OTHER; note = 2'-O-methyladenosine
  modified_base 9: mod_base = gm
  modified_base 10: mod_base = cm
  modified_base 11: mod_base = gm
  modified_base 12: mod_base = um
  modified_base 13: mod_base = gm
  modified_base 14: mod_base = OTHER; note = 2'-fluoroadenosine
  modified_base 15: mod_base = gm
  modified_base 16: mod_base = OTHER; note = 2'-fluorocytidine
  modified_base 17: mod_base = cm
  modified_base 18: mod_base = um
  modified_base 19: mod_base = um
  modified_base 20: mod_base = um
  modified_base 21: mod_base = OTHER; note = 2'-O-methyladenosine with a 3'-phosphorothioate linkage
  modified_base 22: mod_base = OTHER; note = 2'-O-methyladenosine with a 3'-phosphorothioate linkage
  modified_base 23: mod_base = gm
tcttgtcagcgtgagcctttaag

SEQ ID NO: 198 - RNA, 23 nt, synthetic construct
  source 1..23: mol_type = other RNA
  modified_base 1: mod_base = OTHER; note = 2'-O-methyluridine with a 3'-phosphorothioate linkage and a 5'-phosphate substitution
  modified_base 2: mod_base = OTHER; note = 2'-fluorocytidine with a 3'-phosphorothioate linkage
  modified_base 3: mod_base = um
  modified_base 4: mod_base = cm
  modified_base 5: mod_base = OTHER; note = 2'-fluorocytidine
  modified_base 6: mod_base = OTHER; note = 2'-O-methyladenosine
  modified_base 7: mod_base = OTHER; note = 2'-fluoroadenosine
  modified_base 8: mod_base = cm
  modified_base 9: mod_base = OTHER; note = 2'-O-methyladenosine
  modified_base 10: mod_base = gm
  modified_base 11: mod_base = gm
  modified_base 12: mod_base = cm
  modified_base 13: mod_base = um
  modified_base 14: mod_base = OTHER; note = 2'-fluorouridine
  modified_base 15: mod_base = gm
  modified_base 16: mod_base = OTHER; note = 2'-fluorocytidine
  modified_base 17: mod_base = cm
  modified_base 18: mod_base = cm
  modified_base 19: mod_base = gm
  modified_base 20: mod_base = OTHER; note = 2'-O-methyladenosine
  modified_base 21: mod_base = OTHER; note = 2'-O-methyladenosine with a 3'-phosphorothioate linkage
  modified_base 22: mod_base = OTHER; note = 2'-O-methylguanosine with a 3'-phosphorothioate linkage
  modified_base 23: mod_base = um
tctccaacaggcttgcccgaagt

SEQ ID NO: 199 - RNA, 23 nt, synthetic construct
  source 1..23: mol_type = other RNA
  modified_base 1: mod_base = OTHER; note = 2'-O-methyluridine with a 3'-phosphorothioate linkage and a 5'-phosphate substitution
  modified_base 2: mod_base = OTHER; note = 2'-fluoroguanosine with a 3'-phosphorothioate linkage
  modified_base 3: mod_base = OTHER; note = 2'-O-methyladenosine
  modified_base 4: mod_base = um
  modified_base 5: mod_base = OTHER; note = 2'-fluorocytidine
  modified_base 6: mod_base = um
  modified_base 7: mod_base = OTHER; note = 2'-fluoroguanosine
  modified_base 8: mod_base = um
  modified_base 9: mod_base = cm
  modified_base 10: mod_base = gm
  modified_base 11: mod_base = cm
  modified_base 12: mod_base = OTHER; note = 2'-O-methyladenosine
  modified_base 13: mod_base = gm
  modified_base 14: mod_base = OTHER; note = 2'-fluorocytidine
  modified_base 15: mod_base = cm
  modified_base 16: mod_base = OTHER; note = 2'-fluoroguanosine
  modified_base 17: mod_base = OTHER; note = 2'-O-methyladenosine
  modified_base 18: mod_base = um
  modified_base 19: mod_base = gm
  modified_base 20: mod_base = cm
  modified_base 21: mod_base = OTHER; note = 2'-O-methyluridine with a 3'-phosphorothioate linkage
  modified_base 22: mod_base = OTHER; note = 2'-O-methylguanosine with a 3'-phosphorothioate linkage
  modified_base 23: mod_base = cm
tgatctgtcgcagccgatgctgc

SEQ ID NO: 200 - RNA, 23 nt, synthetic construct
  source 1..23: mol_type = other RNA
  modified_base 1: mod_base = OTHER; note = 2'-O-methyluridine with a 3'-phosphorothioate linkage and a 5'-phosphate substitution
  modified_base 2: mod_base = OTHER; note = 2'-fluorouridine with a 3'-phosphorothioate linkage
  modified_base 3: mod_base = cm
  modified_base 4: mod_base = OTHER; note = 2'-O-methyladenosine
  modified_base 5: mod_base = OTHER; note = 2'-fluoroguanosine
  modified_base 6: mod_base = um
  modified_base 7: mod_base = OTHER; note = 2'-fluorouridine
  modified_base 8: mod_base = cm
  modified_base 9: mod_base = cm
  modified_base 10: mod_base = OTHER; note = 2'-O-methyladenosine
  modified_base 11: mod_base = um
  modified_base 12: mod_base = cm
  modified_base 13: mod_base = cm
  modified_base 14: mod_base = OTHER; note = 2'-fluoroadenosine
  modified_base 15: mod_base = gm
  modified_base 16: mod_base = OTHER; note = 2'-fluoroguanosine
  modified_base 17: mod_base = cm
  modified_base 18: mod_base = OTHER; note = 2'-O-methyladenosine
  modified_base 19: mod_base = gm
  modified_base 20: mod_base = OTHER; note = 2'-O-methyladenosine
  modified_base 21: mod_base = OTHER; note = 2'-O-methyluridine with a 3'-phosphorothioate linkage
  modified_base 22: mod_base = OTHER; note = 2'-O-methyluridine with a 3'-phosphorothioate linkage
  modified_base 23: mod_base = cm
ttcagttccatccaggcagattc

SEQ ID NO: 201 - RNA, 23 nt, synthetic construct
  source 1..23: mol_type = other RNA
  modified_base 1: mod_base = OTHER; note = 2'-O-methyluridine with a 3'-phosphorothioate linkage and a 5'-phosphate substitution
  modified_base 2: mod_base = OTHER; note = 2'-fluorocytidine with a 3'-phosphorothioate linkage
  modified_base 3: mod_base = um
  modified_base 4: mod_base = cm
  modified_base 5: mod_base = OTHER; note = 2'-fluorouridine
  modified_base 6: mod_base = gm
  modified_base 7: mod_base = OTHER; note = 2'-fluorocytidine
  modified_base 8: mod_base = um
  modified_base 9: mod_base = um
  modified_base 10: mod_base = gm
  modified_base 11: mod_base = um
  modified_base 12: mod_base = cm
  modified_base 13: mod_base = OTHER; note = 2'-O-methyladenosine
  modified_base 14: mod_base = OTHER; note = 2'-fluoroguanosine
  modified_base 15: mod_base = cm
  modified_base 16: mod_base = OTHER; note = 2'-fluoroguanosine
  modified_base 17: mod_base = um
  modified_base 18: mod_base = gm
  modified_base 19: mod_base = OTHER; note = 2'-O-methyladenosine
  modified_base 20: mod_base = gm
  modified_base 21: mod_base = OTHER; note = 2'-O-methylcytidine with a 3'-phosphorothioate linkage
  modified_base 22: mod_base = OTHER; note = 2'-O-methylcytidine with a 3'-phosphorothioate linkage
  modified_base 23: mod_base = um
tctctgcttgtcagcgtgagcct

SEQ ID NO: 202 - RNA, 23 nt, synthetic construct
  source 1..23: mol_type = other RNA
  modified_base 1: mod_base = OTHER; note = 2'-O-methyluridine with a 3'-phosphorothioate linkage and a 5'-phosphate substitution
  modified_base 2: mod_base = OTHER; note = 2'-fluorocytidine with a 3'-phosphorothioate linkage
  modified_base 3: mod_base = OTHER; note = 2'-O-methyladenosine
  modified_base 4: mod_base = gm
  modified_base 5: mod_base = OTHER; note = 2'-fluoroadenosine
  modified_base 6: mod_base = OTHER; note = 2'-O-methyladenosine
  modified_base 7: mod_base = OTHER; note = 2'-fluorouridine
  modified_base 8: mod_base = OTHER; note = 2'-O-methyladenosine
  modified_base 9: mod_base = um
  modified_base 10: mod_base = cm
  modified_base 11: mod_base = cm
  modified_base 12: mod_base = um
  modified_base 13: mod_base = cm
  modified_base 14: mod_base = OTHER; note = 2'-fluorocytidine
  modified_base 15: mod_base = um
  modified_base 16: mod_base = OTHER; note = 2'-fluorocytidine
  modified_base 17: mod_base = cm
  modified_base 18: mod_base = OTHER; note = 2'-O-methyladenosine
  modified_base 19: mod_base = um
  modified_base 20: mod_base = cm
  modified_base 21: mod_base = OTHER; note = 2'-O-methyluridine with a 3'-phosphorothioate linkage
  modified_base 22: mod_base = OTHER; note = 2'-O-methylguanosine with a 3'-phosphorothioate linkage
  modified_base 23: mod_base = OTHER; note = 2'-O-methyladenosine
tcagaatatcctcctccatctga

SEQ ID NO: 203 - RNA, 23 nt, synthetic construct
  source 1..23: mol_type = other RNA
  modified_base 1: mod_base = OTHER; note = 2'-O-methyluridine with a 3'-phosphorothioate linkage and a 5'-phosphate substitution
  modified_base 2: mod_base = OTHER; note = 2'-fluorocytidine with a 3'-phosphorothioate linkage
  modified_base 3: mod_base = gm
  modified_base 4: mod_base = cm
  modified_base 5: mod_base = OTHER; note = 2'-fluoroadenosine
  modified_base 6: mod_base = gm
  modified_base 7: mod_base = OTHER; note = 2'-fluorocytidine
  modified_base 8: mod_base = cm
  modified_base 9: mod_base = gm
  modified_base 10: mod_base = OTHER; note = 2'-O-methyladenosine
  modified_base 11: mod_base = um
  modified_base 12: mod_base = gm
  modified_base 13: mod_base = cm
  modified_base 14: mod_base = OTHER; note = 2'-fluorouridine
  modified_base 15: mod_base = gm
  modified_base 16: mod_base = OTHER; note = 2'-fluorocytidine
  modified_base 17: mod_base = um
  modified_base 18: mod_base = gm
  modified_base 19: mod_base = um
  modified_base 20: mod_base = gm
  modified_base 21: mod_base = OTHER; note = 2'-O-methylcytidine with a 3'-phosphorothioate linkage
  modified_base 22: mod_base = OTHER; note = 2'-O-methylcytidine with a 3'-phosphorothioate linkage
  modified_base 23: mod_base = OTHER; note = 2'-O-methyladenosine
tcgcagccgatgctgctgtgcca

SEQ ID NO: 204 - RNA, 23 nt, synthetic construct
  source 1..23: mol_type = other RNA
  modified_base 1: mod_base = OTHER; note = 2'-O-methyluridine with a 3'-phosphorothioate linkage and a 5'-phosphate substitution
  modified_base 2: mod_base = OTHER; note = 2'-fluorouridine with a 3'-phosphorothioate linkage
  modified_base 3: mod_base = OTHER; note = 2'-O-methyladenosine
  modified_base 4: mod_base = gm
  modified_base 5: mod_base = OTHER; note = 2'-fluoroadenosine
  modified_base 6: mod_base = gm
  modified_base 7: mod_base = OTHER; note = 2'-fluoroadenosine
  modified_base 8: mod_base = cm
  modified_base 9: mod_base = cm
  modified_base 10: mod_base = cm
  modified_base 11: mod_base = OTHER; note = 2'-O-methyladenosine
  modified_base 12: mod_base = gm
  modified_base 13: mod_base = gm
  modified_base 14: mod_base = OTHER; note = 2'-fluorocytidine
  modified_base 15: mod_base = um
  modified_base 16: mod_base = OTHER; note = 2'-fluoroguanosine
  modified_base 17: mod_base = um
  modified_base 18: mod_base = um
  modified_base 19: mod_base = cm
  modified_base 20: mod_base = cm
  modified_base 21: mod_base = OTHER; note = 2'-O-methyluridine with a 3'-phosphorothioate linkage
  modified_base 22: mod_base = OTHER; note = 2'-O-methylguanosine with a 3'-phosphorothioate linkage
  modified_base 23: mod_base = gm
ttagagacccaggctgttcctgg

SEQ ID NO: 205 - RNA, 23 nt, synthetic construct
  source 1..23: mol_type = other RNA
  modified_base 1: mod_base = OTHER; note = 2'-O-methyluridine with a 3'-phosphorothioate linkage and a 5'-phosphate substitution
  modified_base 2: mod_base = OTHER; note = 2'-fluoroguanosine with a 3'-phosphorothioate linkage
  modified_base 3: mod_base = cm
  modified_base 4: mod_base = um
  modified_base 5: mod_base = OTHER; note = 2'-fluoroguanosine
  modified_base 6: mod_base = cm
  modified_base 7: mod_base = OTHER; note = 2'-fluorouridine
  modified_base 8: mod_base = gm
  modified_base 9: mod_base = um
  modified_base 10: mod_base = gm
  modified_base 11: mod_base = cm
  modified_base 12: mod_base = cm
  modified_base 13: mod_base = OTHER; note = 2'-O-methyladenosine
  modified_base 14: mod_base = OTHER; note = 2'-fluorocytidine
  modified_base 15: mod_base = cm
  modified_base 16: mod_base = OTHER; note = 2'-fluoroadenosine
  modified_base 17: mod_base = um
  modified_base 18: mod_base = cm
  modified_base 19: mod_base = um
  modified_base 20: mod_base = cm
  modified_base 21: mod_base = OTHER; note = 2'-O-methylcytidine with a 3'-phosphorothioate linkage
  modified_base 22: mod_base = OTHER; note = 2'-O-methylcytidine with a 3'-phosphorothioate linkage
  modified_base 23: mod_base = gm
tgctgctgtgccaccatctcccg

SEQ ID NO: 206 - RNA, 23 nt, synthetic construct
  source 1..23: mol_type = other RNA
  modified_base 1: mod_base = OTHER; note = 2'-O-methyluridine with a 3'-phosphorothioate linkage and a 5'-phosphate substitution
  modified_base 2: mod_base = OTHER; note = 2'-fluorouridine with a 3'-phosphorothioate linkage
  modified_base 3: mod_base = cm
  modified_base 4: mod_base = um
  modified_base 5: mod_base = OTHER; note = 2'-fluoroguanosine
  modified_base 6: mod_base = um
  modified_base 7: mod_base = OTHER; note = 2'-fluorocytidine
  modified_base 8: mod_base = gm
  modified_base 9: mod_base = cm
  modified_base 10: mod_base = OTHER; note = 2'-O-methyladenosine
  modified_base 11: mod_base = gm
  modified_base 12: mod_base = cm
  modified_base 13: mod_base = cm
  modified_base 14: mod_base = OTHER; note = 2'-fluoroguanosine
  modified_base 15: mod_base = OTHER; note = 2'-O-methyladenosine
  modified_base 16: mod_base = OTHER; note = 2'-fluorouridine
  modified_base 17: mod_base = gm
  modified_base 18: mod_base = cm
  modified_base 19: mod_base = um
  modified_base 20: mod_base = gm
  modified_base 21: mod_base = OTHER; note = 2'-O-methylcytidine with a 3'-phosphorothioate linkage
  modified_base 22: mod_base = OTHER; note = 2'-O-methyluridine with a 3'-phosphorothioate linkage
  modified_base 23: mod_base = gm
ttctgtcgcagccgatgctgctg

SEQ ID NO: 207 - RNA, 23 nt, synthetic construct
  source 1..23: mol_type = other RNA
  modified_base 1: mod_base = OTHER; note = 2'-O-methyluridine with a 3'-phosphorothioate linkage and a 5'-phosphate substitution
  modified_base 2: mod_base = OTHER; note = 2'-fluoroadenosine with a 3'-phosphorothioate linkage
  modified_base 3: mod_base = gm
  modified_base 4: mod_base = cm
  modified_base 5: mod_base = OTHER; note = 2'-fluorocytidine
  modified_base 6: mod_base = um
  modified_base 7: mod_base = OTHER; note = 2'-fluorouridine
  modified_base 8: mod_base = um
  modified_base 9: mod_base = OTHER; note = 2'-O-methyladenosine
  modified_base 10: mod_base = OTHER; note = 2'-O-methyladenosine
  modified_base 11: mod_base = gm
  modified_base 12: mod_base = OTHER; note = 2'-O-methyladenosine
  modified_base 13: mod_base = cm
  modified_base 14: mod_base = OTHER; note = 2'-fluorocytidine
  modified_base 15: mod_base = um
  modified_base 16: mod_base = OTHER; note = 2'-fluorocytidine
  modified_base 17: mod_base = OTHER; note = 2'-O-methyladenosine
  modified_base 18: mod_base = OTHER; note = 2'-O-methyladenosine
  modified_base 19: mod_base = OTHER; note = 2'-O-methyladenosine
  modified_base 20: mod_base = um
  modified_base 21: mod_base = OTHER; note = 2'-O-methyluridine with a 3'-phosphorothioate linkage
  modified_base 22: mod_base = OTHER; note = 2'-O-methylcytidine with a 3'-phosphorothioate linkage
  modified_base 23: mod_base = um
tagcctttaagacctcaaattct

SEQ ID NO: 208 - RNA, 23 nt, synthetic construct
  source 1..23: mol_type = other RNA
  modified_base 1: mod_base = OTHER; note = 2'-O-methyluridine with a 3'-phosphorothioate linkage and a 5'-phosphate substitution
  modified_base 2: mod_base = OTHER; note = 2'-fluoroguanosine with a 3'-phosphorothioate linkage
  modified_base 3: mod_base = gm
  modified_base 4: mod_base = cm
  modified_base 5: mod_base = OTHER; note = 2'-fluoroguanosine
  modified_base 6: mod_base = cm
  modified_base 7: mod_base = OTHER; note = 2'-fluorouridine
  modified_base 8: mod_base = cm
  modified_base 9: mod_base = cm
  modified_base 10: mod_base = um
  modified_base 11: mod_base = cm
  modified_base 12: mod_base = OTHER; note = 2'-O-methyladenosine
  modified_base 13: mod_base = gm
  modified_base 14: mod_base = OTHER; note = 2'-fluorocytidine
  modified_base 15: mod_base = um
  modified_base 16: mod_base = OTHER; note = 2'-fluoroguanosine
  modified_base 17: mod_base = gm
  modified_base 18: mod_base = OTHER; note = 2'-O-methyladenosine
  modified_base 19: mod_base = cm
  modified_base 20: mod_base = um
  modified_base 21: mod_base = OTHER; note = 2'-O-methyluridine with a 3'-phosphorothioate linkage
  modified_base 22: mod_base = OTHER; note = 2'-O-methylcytidine with a 3'-phosphorothioate linkage
  modified_base 23: mod_base = um
tggcgctcctcagctggacttct

SEQ ID NO: 209 - RNA, 23 nt, synthetic construct
  source 1..23: mol_type = other RNA
  modified_base 1: mod_base = OTHER; note = 2'-O-methyluridine with a 3'-phosphorothioate linkage and a 5'-phosphate substitution
  modified_base 2: mod_base = OTHER; note = 2'-fluoroguanosine with a 3'-phosphorothioate linkage
  modified_base 3: mod_base = cm
  modified_base 4: mod_base = gm
  modified_base 5: mod_base = OTHER; note = 2'-fluorouridine
  modified_base 6: mod_base = gm
  modified_base 7: mod_base = OTHER; note = 2'-fluoroadenosine
  modified_base 8: mod_base = gm
  modified_base 9: mod_base = cm
  modified_base 10: mod_base = cm
  modified_base 11: mod_base = um
  modified_base 12: mod_base = um
  modified_base 13: mod_base = um
  modified_base 14: mod_base = OTHER; note = 2'-fluoroadenosine
  modified_base 15: mod_base = OTHER; note = 2'-O-methyladenosine
  modified_base 16: mod_base = OTHER; note = 2'-fluoroguanosine
  modified_base 17: mod_base = OTHER; note = 2'-O-methyladenosine
  modified_base 18: mod_base = cm
  modified_base 19: mod_base = cm
  modified_base 20: mod_base = um
  modified_base 21: mod_base = OTHER; note = 2'-O-methylcytidine with a 3'-phosphorothioate linkage
  modified_base 22: mod_base = OTHER; note = 2'-O-methyladenosine with a 3'-phosphorothioate linkage
  modified_base 23: mod_base = OTHER; note = 2'-O-methyladenosine
tgcgtgagcctttaagacctcaa

SEQ ID NO: 210 - RNA, 23 nt, synthetic construct
  source 1..23: mol_type = other RNA
  modified_base 1: mod_base = OTHER; note = 2'-O-methyluridine with a 3'-phosphorothioate linkage
  modified_base 2: mod_base = OTHER; note = 2'-fluorouridine with a 3'-phosphorothioate linkage
  modified_base 3: mod_base = cm
  modified_base 4: mod_base = um
  modified_base 5: mod_base = OTHER; note = 2'-fluorocytidine
  modified_base 6: mod_base = cm
  modified_base 7: mod_base = OTHER; note = 2'-fluoroadenosine
  modified_base 8: mod_base = OTHER; note = 2'-O-methyladenosine
  modified_base 9: mod_base = cm
  modified_base 10: mod_base = OTHER; note = 2'-O-methyladenosine
  modified_base 11: mod_base = gm
  modified_base 12: mod_base = gm
  modified_base 13: mod_base = cm
  modified_base 14: mod_base = OTHER; note = 2'-fluorouridine
  modified_base 15: mod_base = um
  modified_base 16: mod_base = OTHER; note = 2'-fluoroguanosine
  modified_base 17: mod_base = cm
  modified_base 18: mod_base = cm
  modified_base 19: mod_base = cm
  modified_base 20: mod_base = gm
  modified_base 21: mod_base = OTHER; note = 2'-O-methyladenosine with a 3'-phosphorothioate linkage
  modified_base 22: mod_base = OTHER; note = 2'-O-methyladenosine with a 3'-phosphorothioate linkage
  modified_base 23: mod_base = gm
ttctccaacaggcttgcccgaag

SEQ ID NO: 211 - RNA, 23 nt, synthetic construct
  source 1..23: mol_type = other RNA
  modified_base 1: mod_base = OTHER; note = 2'-O-methyluridine with a 3'-phosphorothioate linkage
  modified_base 2: mod_base = OTHER; note = 2'-fluorocytidine with a 3'-phosphorothioate linkage
  modified_base 3: mod_base = OTHER; note = 2'-O-methyladenosine
  modified_base 4: mod_base = gm
  modified_base 5: mod_base = OTHER; note = 2'-fluorouridine
  modified_base 6: mod_base = um
  modified_base 7: mod_base = OTHER; note = 2'-fluorocytidine
  modified_base 8: mod_base = cm
  modified_base 9: mod_base = OTHER; note = 2'-O-methyladenosine
  modified_base 10: mod_base = um
  modified_base 11: mod_base = cm
  modified_base 12: mod_base = cm
  modified_base 13: mod_base = OTHER; note = 2'-O-methyladenosine
  modified_base 14: mod_base = OTHER; note = 2'-fluoroguanosine
  modified_base 15: mod_base = gm
  modified_base 16: mod_base = OTHER; note = 2'-fluorocytidine
  modified_base 17: mod_base = OTHER; note = 2'-O-methyladenosine
  modified_base 18: mod_base = gm
  modified_base 19: mod_base = OTHER; note = 2'-O-methyladenosine
  modified_base 20: mod_base = um
  modified_base 21: mod_base = OTHER; note = 2'-O-methyluridine with a 3'-phosphorothioate linkage
  modified_base 22: mod_base = OTHER; note = 2'-O-methylcytidine with a 3'-phosphorothioate linkage
  modified_base 23: mod_base = OTHER; note = 2'-O-methyladenosine
tcagttccatccaggcagattca

SEQ ID NO: 212 - RNA, 23 nt, synthetic construct
  source 1..23: mol_type = other RNA
  modified_base 1: mod_base = OTHER; note = 2'-O-methyluridine with a 3'-phosphorothioate linkage
  modified_base 2: mod_base = OTHER; note = 2'-fluoroguanosine with a 3'-phosphorothioate linkage
  modified_base 3: mod_base = gm
  modified_base 4: mod_base = um
  modified_base 5: mod_base = OTHER; note = 2'-fluorocytidine
  modified_base 6: mod_base = cm
  modified_base 7: mod_base = OTHER; note = 2'-fluorouridine
  modified_base 8: mod_base = cm
  modified_base 9: mod_base = OTHER; note = 2'-O-methyladenosine
  modified_base 10: mod_base = gm
  modified_base 11: mod_base = um
  modified_base 12: mod_base = um
  modified_base 13: mod_base = cm
  modified_base 14: mod_base = OTHER; note = 2'-fluorocytidine
  modified_base 15: mod_base = OTHER; note = 2'-O-methyladenosine
  modified_base 16: mod_base = OTHER; note = 2'-fluorouridine
  modified_base 17: mod_base = cm
  modified_base 18: mod_base = cm
  modified_base 19: mod_base = OTHER; note = 2'-O-methyladenosine
  modified_base 20: mod_base = gm
  modified_base 21: mod_base = OTHER; note = 2'-O-methylguanosine with a 3'-phosphorothioate linkage
  modified_base 22: mod_base = OTHER; note = 2'-O-methylcytidine with a 3'-phosphorothioate linkage
  modified_base 23: mod_base = OTHER; note = 2'-O-methyladenosine
tggtcctcagttccatccaggca

SEQ ID NO: 213 - RNA, 23 nt, synthetic construct
  source 1..23: mol_type = other RNA
  modified_base 1: mod_base = OTHER; note = 2'-O-methyluridine with a 3'-phosphorothioate linkage
  modified_base 2: mod_base = OTHER; note = 2'-fluoroadenosine with a 3'-phosphorothioate linkage
  modified_base 3: mod_base = um
  modified_base 4: mod_base = gm
  modified_base 5: mod_base = OTHER; note = 2'-fluorocytidine
  modified_base 6: mod_base = cm
  modified_base 7: mod_base = OTHER; note = 2'-fluoroadenosine
  modified_base 8: mod_base = cm
  modified_base 9: mod_base = gm
  modified_base 10: mod_base = OTHER; note = 2'-O-methyladenosine
  modified_base 11: mod_base = cm
  modified_base 12: mod_base = um
  modified_base 13: mod_base = cm
  modified_base 14: mod_base = OTHER; note = 2'-fluorouridine
  modified_base 15: mod_base = gm
  modified_base 16: mod_base = OTHER; note = 2'-fluorocytidine
  modified_base 17: mod_base = um
  modified_base 18: mod_base = um
  modified_base 19: mod_base = um
  modified_base 20: mod_base = OTHER; note = 2'-O-methyladenosine
  modified_base 21: mod_base = OTHER; note = 2'-O-methyladenosine with a 3'-phosphorothioate linkage
  modified_base 22: mod_base = OTHER; note = 2'-O-methyluridine with a 3'-phosphorothioate linkage
  modified_base 23: mod_base = gm
tatgccacgactctgctttaatg

SEQ ID NO: 214 - RNA, 23 nt, synthetic construct
  source 1..23: mol_type = other RNA
  modified_base 1: mod_base = OTHER; note = 2'-O-methyluridine with a 3'-phosphorothioate linkage
  modified_base 2: mod_base = OTHER; note = 2'-fluorouridine with a 3'-phosphorothioate linkage
  modified_base 3: mod_base = cm
  modified_base 4: mod_base = um
  modified_base 5: mod_base = OTHER; note = 2'-fluorocytidine
  modified_base 6: mod_base = um
  modified_base 7: mod_base = OTHER; note = 2'-fluorocytidine
  modified_base 8: mod_base = cm
  modified_base 9: mod_base = um
  modified_base 10: mod_base = gm
  modified_base 11: mod_base = gm
  modified_base 12: mod_base = OTHER; note = 2'-O-methyladenosine
  modified_base 13: mod_base = um
  modified_base 14: mod_base = OTHER; note = 2'-fluorocytidine
  modified_base 15: mod_base = um
  modified_base 16: mod_base = OTHER; note = 2'-fluoroguanosine
  modified_base 17: mod_base = um
  modified_base 18: mod_base = cm
  modified_base 19: mod_base = gm
  modified_base 20: mod_base = cm
  modified_base 21: mod_base = OTHER; note = 2'-O-methyladenosine with a 3'-phosphorothioate linkage
  modified_base 22: mod_base = OTHER; note = 2'-O-methylguanosine with a 3'-phosphorothioate linkage
  modified_base 23: mod_base = cm
ttctctcctggatctgtcgcagc

SEQ ID NO: 215 - RNA, 23 nt, synthetic construct
  source 1..23: mol_type = other RNA
  modified_base 1: mod_base = OTHER; note = 2'-O-methyluridine with a 3'-phosphorothioate linkage
  modified_base 2: mod_base = OTHER; note = 2'-fluoroguanosine with a 3'-phosphorothioate linkage
  modified_base 3: mod_base = um
  modified_base 4: mod_base = um
  modified_base 5: mod_base = OTHER; note = 2'-fluorocytidine
  modified_base 6: mod_base = cm
  modified_base 7: mod_base = OTHER; note = 2'-fluoroadenosine
  modified_base 8: mod_base = um
  modified_base 9: mod_base = cm
  modified_base 10: mod_base = cm
  modified_base 11: mod_base = OTHER; note = 2'-O-methyladenosine
  modified_base 12: mod_base = gm
  modified_base 13: mod_base = gm
  modified_base 14: mod_base = OTHER; note = 2'-fluorocytidine
  modified_base 15: mod_base = OTHER; note = 2'-O-methyladenosine
  modified_base 16: mod_base = OTHER; note = 2'-fluoroguanosine
  modified_base 17: mod_base = OTHER; note = 2'-O-methyladenosine
  modified_base 18: mod_base = um
  modified_base 19: mod_base = um
  modified_base 20: mod_base = cm
  modified_base 21: mod_base = OTHER; note = 2'-O-methyladenosine with a 3'-phosphorothioate linkage
  modified_base 22: mod_base = OTHER; note = 2'-O-methylguanosine with a 3'-phosphorothioate linkage
  modified_base 23: mod_base = gm
tgttccatccaggcagattcagg

SEQ ID NO: 216 - RNA, 23 nt, synthetic construct
  source 1..23: mol_type = other RNA
  modified_base 1: mod_base = OTHER; note = 2'-O-methyluridine with a 3'-phosphorothioate linkage
  modified_base 2: mod_base = OTHER; note = 2'-fluorouridine with a 3'-phosphorothioate linkage
  modified_base 3: mod_base = cm
  modified_base 4: mod_base = cm
  modified_base 5: mod_base = OTHER; note = 2'-fluorocytidine
  modified_base 6: mod_base = OTHER; note = 2'-O-methyladenosine
  modified_base 7: mod_base = OTHER; note = 2'-fluoroguanosine
  modified_base 8: mod_base = um
  modified_base 9: mod_base = gm
  modified_base 10: mod_base = OTHER; note = 2'-O-methyladenosine
  modified_base 11: mod_base = OTHER; note = 2'-O-methyladenosine
  modified_base 12: mod_base = cm
  modified_base 13: mod_base = OTHER; note = 2'-O-methyladenosine
  modified_base 14: mod_base = OTHER; note = 2'-fluoroguanosine
  modified_base 15: mod_base = gm
  modified_base 16: mod_base = OTHER; note = 2'-fluorocytidine
  modified_base 17: mod_base = OTHER; note = 2'-O-methyladenosine
  modified_base 18: mod_base = gm
  modified_base 19: mod_base = cm
  modified_base 20: mod_base = um
  modified_base 21: mod_base = OTHER; note = 2'-O-methylcytidine with a 3'-phosphorothioate linkage
  modified_base 22: mod_base = OTHER; note = 2'-O-methylcytidine with a 3'-phosphorothioate linkage
  modified_base 23: mod_base = um
ttcccagtgaacaggcagctcct

SEQ ID NO: 217 - RNA, 23 nt, synthetic construct
  source 1..23: mol_type = other RNA
  modified_base 1: mod_base = OTHER; note = 2'-O-methyluridine with a 3'-phosphorothioate linkage
  modified_base 2: mod_base = OTHER; note = 2'-fluoroadenosine with a 3'-phosphorothioate linkage
  modified_base 3: mod_base = gm
  modified_base 4: mod_base = cm
  modified_base 5: mod_base = OTHER; note = 2'-fluoroguanosine
  modified_base 6: mod_base = um
  modified_base 7: mod_base = OTHER; note = 2'-fluoroguanosine
  modified_base 8: mod_base = OTHER; note = 2'-O-methyladenosine
  modified_base 9: mod_base = gm
  modified_base 10: mod_base = cm
  modified_base 11: mod_base = cm
  modified_base 12: mod_base = um
  modified_base 13: mod_base = um
  modified_base 14: mod_base = OTHER; note = 2'-fluorouridine
  modified_base 15: mod_base = OTHER; note = 2'-O-methyladenosine
  modified_base 16: mod_base = OTHER; note = 2'-fluoroadenosine
  modified_base 17: mod_base = gm
  modified_base 18: mod_base = OTHER; note = 2'-O-methyladenosine
  modified_base 19: mod_base = cm
  modified_base 20: mod_base = cm
  modified_base 21: mod_base = OTHER; note = 2'-O-methyluridine with a 3'-phosphorothioate linkage
  modified_base 22: mod_base = OTHER; note = 2'-O-methylcytidine with a 3'-phosphorothioate linkage
  modified_base 23: mod_base = OTHER; note = 2'-O-methyladenosine
tagcgtgagcctttaagacctca

SEQ ID NO: 218 - RNA, 23 nt, synthetic construct
  source 1..23: mol_type = other RNA
  modified_base 1: mod_base = OTHER; note = 2'-O-methyluridine with a 3'-phosphorothioate linkage
  modified_base 2: mod_base = OTHER; note = 2'-fluoroguanosine with a 3'-phosphorothioate linkage
  modified_base 3: mod_base = cm
  modified_base 4: mod_base = cm
  modified_base 5: mod_base = OTHER; note = 2'-fluorocytidine
  modified_base 6: mod_base = um
  modified_base 7: mod_base = OTHER; note = 2'-fluoroguanosine
  modified_base 8: mod_base = gm
  modified_base 9: mod_base = cm
  modified_base 10: mod_base = um
  modified_base 11: mod_base = gm
  modified_base 12: mod_base = OTHER; note = 2'-O-methyladenosine
  modified_base 13: mod_base = um
  modified_base 14: mod_base = OTHER; note = 2'-fluorocytidine
  modified_base 15: mod_base = cm
  modified_base 16: mod_base = OTHER; note = 2'-fluorocytidine
  modified_base 17: mod_base = OTHER; note = 2'-O-methyladenosine
  modified_base 18: mod_base = gm
  modified_base 19: mod_base = um
  modified_base 20: mod_base = gm
  modified_base 21: mod_base = OTHER; note = 2'-O-methyladenosine with a 3'-phosphorothioate linkage
  modified_base 22: mod_base = OTHER; note = 2'-O-methyladenosine with a 3'-phosphorothioate linkage
  modified_base 23: mod_base = cm
tgccctggctgatcccagtgaac

SEQ ID NO: 219 - RNA, 23 nt, synthetic construct
  source 1..23: mol_type = other RNA
  modified_base 1: mod_base = OTHER; note = 2'-O-methyluridine with a 3'-phosphorothioate linkage
  modified_base 2: mod_base = OTHER; note = 2'-fluorocytidine with a 3'-phosphorothioate linkage
  modified_base 3: mod_base = cm
  modified_base 4: mod_base = OTHER; note = 2'-O-methyladenosine
  modified_base 5: mod_base = OTHER; note = 2'-fluorocytidine
  modified_base 6: mod_base = gm
  modified_base 7: mod_base = OTHER; note = 2'-fluoroadenosine
  modified_base 8: mod_base = cm
  modified_base 9: mod_base = um
  modified_base 10: mod_base = cm
  modified_base 11: mod_base = um
  modified_base 12: mod_base = gm
  modified_base 13: mod_base = cm
  modified_base 14: mod_base = OTHER; note = 2'-fluorouridine
  modified_base 15: mod_base = um
  modified_base 16: mod_base = OTHER; note = 2'-fluorouridine
  modified_base 17: mod_base = OTHER; note = 2'-O-methyladenosine
  modified_base 18: mod_base = OTHER; note = 2'-O-methyladenosine
  modified_base 19: mod_base = um
  modified_base 20: mod_base = gm
  modified_base 21: mod_base = OTHER; note = 2'-O-methyladenosine with a 3'-phosphorothioate linkage
  modified_base 22: mod_base = OTHER; note = 2'-O-methylguanosine with a 3'-phosphorothioate linkage
  modified_base 23: mod_base = gm
tccacgactctgctttaatgagg

SEQ ID NO: 220 - RNA, 23 nt, synthetic construct
  source 1..23: mol_type = other RNA
  modified_base 1: mod_base = OTHER; note = 2'-O-methyluridine with a 3'-phosphorothioate linkage
  modified_base 2: mod_base = OTHER; note = 2'-fluorocytidine with a 3'-phosphorothioate linkage
  modified_base 3: mod_base = OTHER; note = 2'-O-methyladenosine
  modified_base 4: mod_base = um
  modified_base 5: mod_base = OTHER; note = 2'-fluoroadenosine
  modified_base 6: mod_base = gm
  modified_base 7: mod_base = OTHER; note = 2'-fluoroadenosine
  modified_base 8: mod_base = gm
  modified_base 9: mod_base = OTHER; note = 2'-O-methyladenosine
  modified_base 10: mod_base = cm
  modified_base 11: mod_base = cm
  modified_base 12: mod_base = cm
  modified_base 13: mod_base = OTHER; note = 2'-O-methyladenosine
  modified_base 14: mod_base = OTHER; note = 2'-fluoroguanosine
  modified_base 15: mod_base = gm
  modified_base 16: mod_base = OTHER; note = 2'-fluorocytidine
  modified_base 17: mod_base = um
  modified_base 18: mod_base = gm
  modified_base 19: mod_base = um
  modified_base 20: mod_base = um
  modified_base 21: mod_base = OTHER; note = 2'-O-methylcytidine with a 3'-phosphorothioate linkage
  modified_base 22: mod_base = OTHER; note = 2'-O-methylcytidine with a 3'-phosphorothioate linkage
  modified_base 23: mod_base = um
tcatagagacccaggctgttcct

SEQ ID NO: 221 - RNA, 23 nt, synthetic construct
  source 1..23: mol_type = other RNA
  modified_base 1: mod_base = OTHER; note = 2'-O-methyluridine with a 3'-phosphorothioate linkage
  modified_base 2: mod_base = OTHER; note = 2'-fluorocytidine with a 3'-phosphorothioate linkage
  modified_base 3: mod_base = cm
  modified_base 4: mod_base = cm
  modified_base 5: mod_base = OTHER; note = 2'-fluoroguanosine
  modified_base 6: mod_base = gm
  modified_base 7: mod_base = OTHER; note = 2'-fluorocytidine
  modified_base 8: mod_base = um
  modified_base 9: mod_base = gm
  modified_base 10: mod_base = OTHER; note = 2'-O-methyladenosine
  modified_base 11: mod_base = cm
  modified_base 12: mod_base = cm
  modified_base 13: mod_base = um
  modified_base 14: mod_base = OTHER; note = 2'-fluorocytidine
  modified_base 15: mod_base = cm
  modified_base 16: mod_base = OTHER; note = 2'-fluorouridine
  modified_base 17: mod_base = gm
  modified_base 18: mod_base = cm
  modified_base 19: mod_base = cm
  modified_base 20: mod_base = cm
  modified_base 21: mod_base = OTHER; note = 2'-O-methylcytidine with a 3'-phosphorothioate linkage
  modified_base 22: mod_base = OTHER; note = 2'-O-methyladenosine with a 3'-phosphorothioate linkage
  modified_base 23: mod_base = gm
tcccggctgacctcctgccccag

SEQ ID NO: 222 - RNA, 23 nt, synthetic construct
  source 1..23: mol_type = other RNA
  modified_base 1: mod_base = OTHER; note = 2'-O-methyluridine with a 3'-phosphorothioate linkage
  modified_base 2: mod_base = OTHER; note = 2'-fluorocytidine with a 3'-phosphorothioate linkage
  modified_base 3: mod_base = OTHER; note = 2'-O-methyladenosine
  modified_base 4: mod_base = gm
  modified_base 5: mod_base = OTHER; note = 2'-fluorocytidine
  modified_base 6: mod_base = um
  modified_base 7: mod_base = OTHER; note = 2'-fluoroguanosine
  modified_base 8: mod_base = gm
  modified_base 9: mod_base = OTHER; note = 2'-O-methyladenosine
  modified_base 10: mod_base = cm
  modified_base 11: mod_base = um
  modified_base 12: mod_base = um
  modified_base 13: mod_base = cm
  modified_base 14: mod_base = OTHER; note = 2'-fluorouridine
  modified_base 15: mod_base = OTHER; note = 2'-O-methyladenosine
  modified_base 16: mod_base = OTHER; note = 2'-fluoroguanosine
  modified_base 17: mod_base = cm
  modified_base 18: mod_base = cm
  modified_base 19: mod_base = gm
  modified_base 20: mod_base = cm
  modified_base 21: mod_base = OTHER; note = 2'-O-methyluridine with a 3'-phosphorothioate linkage
  modified_base 22: mod_base = OTHER; note = 2'-O-methylguanosine with a 3'-phosphorothioate linkage
  modified_base 23: mod_base = cm
tcagctggacttctagccgctgc

SEQ ID NO: 223 - RNA, 23 nt, synthetic construct
  source 1..23: mol_type = other RNA
  modified_base 1: mod_base = OTHER; note = 2'-O-methyluridine with a 3'-phosphorothioate linkage
  modified_base 2: mod_base = OTHER; note = 2'-fluorouridine with a 3'-phosphorothioate linkage
  modified_base 3: mod_base = gm
  modified_base 4: mod_base = cm
  modified_base 5: mod_base = OTHER; note = 2'-fluorouridine
  modified_base 6: mod_base = gm
  modified_base 7: mod_base = OTHER; note = 2'-fluorocytidine
  modified_base 8: mod_base = um
  modified_base 9: mod_base = gm
  modified_base 10: mod_base = um
  modified_base 11: mod_base = gm
  modified_base 12: mod_base = cm
  modified_base 13: mod_base = cm
  modified_base 14: mod_base = OTHER; note = 2'-fluoroadenosine
  modified_base 15: mod_base = cm
  modified_base 16: mod_base = OTHER; note = 2'-fluorocytidine
  modified_base 17: mod_base = OTHER; note = 2'-O-methyladenosine
  modified_base 18: mod_base = um
  modified_base 19: mod_base = cm
  modified_base 20: mod_base = um
  modified_base 21: mod_base = OTHER; note = 2'-O-methylcytidine with a 3'-phosphorothioate linkage
  modified_base 22: mod_base = OTHER; note = 2'-O-methylcytidine with a 3'-phosphorothioate linkage
  modified_base 23: mod_base = cm
ttgctgctgtgccaccatctccc

SEQ ID NO: 224 - RNA, 23 nt, synthetic construct
  source 1..23: mol_type = other RNA
  modified_base 1: mod_base = OTHER; note = 2'-O-methyluridine with a 3'-phosphorothioate linkage
  modified_base 2: mod_base = OTHER; note = 2'-fluoroguanosine with a 3'-phosphorothioate linkage
  modified_base 3: mod_base = um
  modified_base 4: mod_base = um
  modified_base 5: mod_base = OTHER; note = 2'-fluorocytidine
  modified_base 6: mod_base = cm
  modified_base 7: mod_base = OTHER; note = 2'-fluorouridine
  modified_base 8: mod_base = gm
  modified_base 9: mod_base = gm
  modified_base 10: mod_base = cm
  modified_base 11: mod_base = cm
  modified_base 12: mod_base = um
  modified_base 13: mod_base = um
  modified_base 14: mod_base = OTHER; note = 2'-fluorouridine
  modified_base 15: mod_base = gm
  modified_base 16: mod_base = OTHER; note = 2'-fluorouridine
  modified_base 17: mod_base = cm
  modified_base 18: mod_base = OTHER; note = 2'-O-methyladenosine
  modified_base 19: mod_base = gm
  modified_base 20: mod_base = cm
  modified_base 21: mod_base = OTHER; note = 2'-O-methylcytidine with a 3'-phosphorothioate linkage
  modified_base 22: mod_base = OTHER; note = 2'-O-methylguanosine with a 3'-phosphorothioate linkage
  modified_base 23: mod_base = um
tgttcctggcctttgtcagccgt

SEQ ID NO: 225 - RNA, 23 nt, synthetic construct
  source 1..23: mol_type = other RNA
  modified_base 1: mod_base = OTHER; note = 2'-O-methyluridine with a 3'-phosphorothioate linkage
  modified_base 2: mod_base = OTHER; note = 2'-fluorocytidine with a 3'-phosphorothioate linkage
  modified_base 3: mod_base = OTHER; note = 2'-O-methyladenosine
  modified_base 4: mod_base = gm
  modified_base 5: mod_base = OTHER; note = 2'-fluoroguanosine
  modified_base 6: mod_base = cm
  modified_base 7: mod_base = OTHER; note = 2'-fluoroguanosine
  modified_base 8: mod_base = cm
  modified_base 9: mod_base = um
  modified_base 10: mod_base = cm
  modified_base 11: mod_base = cm
  modified_base 12: mod_base = um
  modified_base 13: mod_base = cm
  modified_base 14: mod_base = OTHER; note = 2'-fluoroadenosine
  modified_base 15: mod_base = gm
  modified_base 16: mod_base = OTHER; note = 2'-fluorocytidine
  modified_base 17: mod_base = um
  modified_base 18: mod_base = gm
  modified_base 19: mod_base = gm
  modified_base 20: mod_base = OTHER; note = 2'-O-methyladenosine
  modified_base 21: mod_base = OTHER; note = 2'-O-methylcytidine with a 3'-phosphorothioate linkage
  modified_base 22: mod_base = OTHER; note = 2'-O-methyluridine with a 3'-phosphorothioate linkage
  modified_base 23: mod_base = um
tcaggcgctcctcagctggactt

SEQ ID NO: 226 - RNA, 23 nt, synthetic construct
  source 1..23: mol_type = other RNA
  modified_base 1: mod_base = OTHER; note = 2'-O-methyluridine with a 3'-phosphorothioate linkage
  modified_base 2: mod_base = OTHER; note = 2'-fluoroguanosine with a 3'-phosphorothioate linkage
  modified_base 3: mod_base = cm
  modified_base 4: mod_base = cm
  modified_base 5: mod_base = OTHER; note = 2'-fluoroadenosine
  modified_base 6: mod_base = cm
  modified_base 7: mod_base = OTHER; note = 2'-fluoroguanosine
  modified_base 8: mod_base = OTHER; note = 2'-O-methyladenosine
  modified_base 9: mod_base = cm
  modified_base 10: mod_base = um
  modified_base 11: mod_base = cm
  modified_base 12: mod_base = um
  modified_base 13: mod_base = gm
  modified_base 14: mod_base = OTHER; note = 2'-fluorocytidine
  modified_base 15: mod_base = um
  modified_base 16: mod_base = OTHER; note = 2'-fluorouridine
  modified_base 17: mod_base = um
  modified_base 18: mod_base = OTHER; note = 2'-O-methyladenosine
  modified_base 19: mod_base = OTHER; note = 2'-O-methyladenosine
  modified_base 20: mod_base = um
  modified_base 21: mod_base = OTHER; note = 2'-O-methylguanosine with a 3'-phosphorothioate linkage
  modified_base 22: mod_base = OTHER; note = 2'-O-methyladenosine with a 3'-phosphorothioate linkage
  modified_base 23: mod_base = gm
tgccacgactctgctttaatgag

SEQ ID NO: 227 - RNA, 23 nt, synthetic construct
  source 1..23: mol_type = other RNA
  modified_base 1: mod_base = OTHER; note = 2'-O-methyluridine with a 3'-phosphorothioate linkage
  modified_base 2: mod_base = OTHER; note = 2'-fluorocytidine with a 3'-phosphorothioate linkage
  modified_base 3: mod_base = OTHER; note = 2'-O-methyladenosine
  modified_base 4: mod_base = gm
  modified_base 5: mod_base = OTHER; note = 2'-fluoroguanosine
  modified_base 6: mod_base = cm
  modified_base 7: mod_base = OTHER; note = 2'-fluoroadenosine
  modified_base 8: mod_base = gm
  modified_base 9: mod_base = OTHER; note = 2'-O-methyladenosine
  modified_base 10: mod_base = um
  modified_base 11: mod_base = um
  modified_base 12: mod_base = cm
  modified_base 13: mod_base = OTHER; note = 2'-O-methyladenosine
  modified_base 14: mod_base = OTHER; note = 2'-fluoroguanosine
  modified_base 15: mod_base = gm
  modified_base 16: mod_base = OTHER; note = 2'-fluorocytidine
  modified_base 17: mod_base = um
  modified_base 18: mod_base = gm
  modified_base 19: mod_base = gm
  modified_base 20: mod_base = gm
  modified_base 21: mod_base = OTHER; note = 2'-O-methyladenosine with a 3'-phosphorothioate linkage
  modified_base 22: mod_base = OTHER; note = 2'-O-methylguanosine with a 3'-phosphorothioate linkage
  modified_base 23: mod_base = cm
tcaggcagattcaggctgggagc

SEQ ID NO: 228 - RNA, 23 nt, synthetic construct
  source 1..23: mol_type = other RNA
  modified_base 1: mod_base = OTHER; note = 2'-O-methyluridine with a 3'-phosphorothioate linkage
  modified_base 2: mod_base = OTHER; note = 2'-fluoroguanosine with a 3'-phosphorothioate linkage
  modified_base 3: mod_base = OTHER; note = 2'-O-methyladenosine
  modified_base 4: mod_base = OTHER; note = 2'-O-methyladenosine
  modified_base 5: mod_base = OTHER; note = 2'-fluoroguanosine
  modified_base 6: mod_base = um
  modified_base 7: mod_base = OTHER; note = 2'-fluorouridine
  modified_base 8: mod_base = cm
  modified_base 9: mod_base = cm
  modified_base 10: mod_base = um
  modified_base 11: mod_base = gm
  modified_base 12: mod_base = gm
  modified_base 13: mod_base = gm
  modified_base 14: mod_base = OTHER; note = 2'-fluorocytidine
  modified_base 15: mod_base = um
  modified_base 16: mod_base = OTHER; note = 2'-fluoroguanosine
  modified_base 17: mod_base = cm
  modified_base 18: mod_base = OTHER; note = 2'-O-methyladenosine
  modified_base 19: mod_base = um
  modified_base 20: mod_base = cm
  modified_base 21: mod_base = OTHER; note = 2'-O-methylcytidine with a 3'-phosphorothioate linkage
  modified_base 22: mod_base = OTHER; note = 2'-O-methylcytidine with a 3'-phosphorothioate linkage
  modified_base 23: mod_base = gm
tgaagttcctgggctgcatcccg

SEQ ID NO: 229 - RNA, 23 nt, synthetic construct
  source 1..23: mol_type = other RNA
  modified_base 1: mod_base = OTHER; note = 2'-O-methyluridine with a 3'-phosphorothioate linkage
  modified_base 2: mod_base = OTHER; note = 2'-fluorouridine with a 3'-phosphorothioate linkage
  modified_base 3: mod_base = cm
  modified_base 4: mod_base = cm
  modified_base 5: mod_base = OTHER; note = 2'-fluorouridine
  modified_base 6: mod_base = cm
  modified_base 7: mod_base = OTHER; note = 2'-fluoroadenosine
  modified_base 8: mod_base = gm
  modified_base 9: mod_base = cm
  modified_base 10: mod_base = um
  modified_base 11: mod_base = gm
  modified_base 12: mod_base = gm
  modified_base 13: mod_base = OTHER; note = 2'-O-methyladenosine
  modified_base 14: mod_base = OTHER; note = 2'-fluorocytidine
  modified_base 15: mod_base = um
  modified_base 16: mod_base = OTHER; note = 2'-fluorouridine
  modified_base 17: mod_base = cm
  modified_base 18: mod_base = um
  modified_base 19: mod_base = OTHER; note = 2'-O-methyladenosine
  modified_base 20: mod_base = gm
  modified_base 21: mod_base = OTHER; note = 2'-O-methylcytidine with a 3'-phosphorothioate linkage
  modified_base 22: mod_base = OTHER; note = 2'-O-methylcytidine with a 3'-phosphorothioate linkage
  modified_base 23: mod_base = gm
ttcctcagctggacttctagccg

SEQ ID NO: 230 - RNA, 23 nt, synthetic construct
  source 1..23: mol_type = other RNA
  modified_base 1: mod_base = OTHER; note = 2'-O-methyluridine with a 3'-phosphorothioate linkage
  modified_base 2: mod_base = OTHER; note = 2'-fluorouridine with a 3'-phosphorothioate linkage
  modified_base 3: mod_base = cm
  modified_base 4: mod_base = gm
  modified_base 5: mod_base = OTHER; note = 2'-fluorocytidine
  modified_base 6: mod_base = OTHER; note = 2'-O-methyladenosine
  modified_base 7: mod_base = OTHER; note = 2'-fluoroguanosine
  modified_base 8: mod_base = cm
  modified_base 9: mod_base = cm
  modified_base 10: mod_base = gm
  modified_base 11: mod_base = OTHER; note = 2'-O-methyladenosine
  modified_base 12: mod_base = um
  modified_base 13: mod_base = gm
  modified_base 14: mod_base = OTHER; note = 2'-fluorocytidine
  modified_base 15: mod_base = um
  modified_base 16: mod_base = OTHER; note = 2'-fluoroguanosine
  modified_base 17: mod_base = cm
  modified_base 18: mod_base = um
  modified_base 19: mod_base = gm
  modified_base 20: mod_base = um
  modified_base 21: mod_base = OTHER; note = 2'-O-methylguanosine with a 3'-phosphorothioate linkage
  modified_base 22: mod_base = OTHER; note = 2'-O-methylcytidine with a 3'-phosphorothioate linkage
  modified_base 23: mod_base = cm
ttcgcagccgatgctgctgtgcc

SEQ ID NO: 231 - RNA, 23 nt, synthetic construct
  source 1..23: mol_type = other RNA
  modified_base 1: mod_base = OTHER; note = 2'-O-methyluridine with a 3'-phosphorothioate linkage
  modified_base 2: mod_base = OTHER; note = 2'-fluoroadenosine with a 3'-phosphorothioate linkage
  modified_base 3: mod_base = cm
  modified_base 4: mod_base = OTHER; note = 2'-O-methyladenosine
  modified_base 5: mod_base = OTHER; note = 2'-fluoroguanosine
  modified_base 6: mod_base = gm
  modified_base 7: mod_base = OTHER; note = 2'-fluorocytidine
  modified_base 8: mod_base = um
  modified_base 9: mod_base = um
  modified_base 10: mod_base = gm
  modified_base 11: mod_base = cm
  modified_base 12: mod_base = cm
  modified_base 13: mod_base = cm
  modified_base 14: mod_base = OTHER; note = 2'-fluoroguanosine
  modified_base 15: mod_base = OTHER; note = 2'-O-methyladenosine
  modified_base 16: mod_base = OTHER; note = 2'-fluoroadenosine
  modified_base 17: mod_base = gm
  modified_base 18: mod_base = um
  modified_base 19: mod_base = um
  modified_base 20: mod_base = cm
  modified_base 21: mod_base = OTHER; note = 2'-O-methylcytidine with a 3'-phosphorothioate linkage
  modified_base 22: mod_base = OTHER; note = 2'-O-methyluridine with a 3'-phosphorothioate linkage
  modified_base 23: mod_base = gm
tacaggcttgcccgaagttcctg

SEQ ID NO: 232 - RNA, 23 nt, synthetic construct
  source 1..23: mol_type = other RNA
  modified_base 1: mod_base = OTHER; note = 2'-O-methyluridine with a 3'-phosphorothioate linkage
  modified_base 2: mod_base = OTHER; note = 2'-fluoroguanosine with a 3'-phosphorothioate linkage
  modified_base 3: mod_base = cm
  modified_base 4: mod_base = gm
  modified_base 5: mod_base = OTHER; note = 2'-fluorocytidine
  modified_base 6: mod_base = cm
  modified_base 7: mod_base = OTHER; note = 2'-fluorocytidine
  modified_base 8: mod_base = um
  modified_base 9: mod_base = gm
  modified_base 10: mod_base = gm
  modified_base 11: mod_base = cm
  modified_base 12: mod_base = um
  modified_base 13: mod_base = gm
  modified_base 14: mod_base = OTHER; note = 2'-fluoroadenosine
  modified_base 15: mod_base = um
  modified_base 16: mod_base = OTHER; note = 2'-fluorocytidine
  modified_base 17: mod_base = cm
  modified_base 18: mod_base = cm
  modified_base 19: mod_base = OTHER; note = 2'-O-methyladenosine
  modified_base 20: mod_base = gm
  modified_base 21: mod_base = OTHER; note = 2'-O-methyluridine with a 3'-phosphorothioate linkage
  modified_base 22: mod_base = OTHER; note = 2'-O-methylguanosine with a 3'-phosphorothioate linkage
  modified_base 23: mod_base = OTHER; note = 2'-O-methyladenosine
tgcgccctggctgatcccagtga

SEQ ID NO: 233 - RNA, 23 nt, synthetic construct
  source 1..23: mol_type = other RNA
  modified_base 1: mod_base = OTHER; note = 2'-O-methyluridine with a 3'-phosphorothioate linkage
  modified_base 2: mod_base = OTHER; note = 2'-fluorocytidine with a 3'-phosphorothioate linkage
  modified_base 3: mod_base = gm
  modified_base 4: mod_base = cm
  modified_base 5: mod_base = OTHER; note = 2'-fluorouridine
  modified_base 6: mod_base = cm
  modified_base 7: mod_base = OTHER; note = 2'-fluorocytidine
  modified_base 8: mod_base = um
  modified_base 9: mod_base = cm
  modified_base 10: mod_base = OTHER; note = 2'-O-methyladenosine
  modified_base 11: mod_base = gm
  modified_base 12: mod_base = cm
  modified_base 13: mod_base = um
  modified_base 14: mod_base = OTHER; note = 2'-fluoroguanosine
  modified_base 15: mod_base = gm
  modified_base 16: mod_base = OTHER; note = 2'-fluoroadenosine
  modified_base 17: mod_base = cm
  modified_base 18: mod_base = um
  modified_base 19: mod_base = um
  modified_base 20: mod_base = cm
  modified_base 21: mod_base = OTHER; note = 2'-O-methyluridine with a 3'-phosphorothioate linkage
  modified_base 22: mod_base = OTHER; note = 2'-O-methyladenosine with a 3'-phosphorothioate linkage
  modified_base 23: mod_base = gm
tcgctcctcagctggacttctag

SEQ ID NO: 234 - RNA, 23 nt, synthetic construct
  source 1..23: mol_type = other RNA
  modified_base 1: mod_base = OTHER; note = 2'-O-methyluridine with a 3'-phosphorothioate linkage
  modified_base 2: mod_base = OTHER; note = 2'-fluoroguanosine with a 3'-phosphorothioate linkage
  modified_base 3: mod_base = gm
  modified_base 4: mod_base = OTHER; note = 2'-O-methyladenosine
  modified_base 5: mod_base = OTHER; note = 2'-fluorouridine
  modified_base 6: mod_base = cm
  modified_base 7: mod_base = OTHER; note = 2'-fluorouridine
  modified_base 8: mod_base = gm
  modified_base 9: mod_base = um
  modified_base 10: mod_base = cm
  modified_base 11: mod_base = gm
  modified_base 12: mod_base = cm
  modified_base 13: mod_base = OTHER; note = 2'-O-methyladenosine
  modified_base 14: mod_base = OTHER; note = 2'-fluoroguanosine
  modified_base 15: mod_base = cm
  modified_base 16: mod_base = OTHER; note = 2'-fluorocytidine
  modified_base 17: mod_base = gm
  modified_base 18: mod_base = OTHER; note = 2'-O-methyladenosine
  modified_base 19: mod_base = um
  modified_base 20: mod_base = gm
  modified_base 21: mod_base = OTHER; note = 2'-O-methylcytidine with a 3'-phosphorothioate linkage
  modified_base 22: mod_base = OTHER; note = 2'-O-methyluridine with a 3'-phosphorothioate linkage
  modified_base 23: mod_base = gm
tggatctgtcgcagccgatgctg

SEQ ID NO: 235 - RNA, 23 nt, synthetic construct
  source 1..23: mol_type = other RNA
  modified_base 1: mod_base = OTHER; note = 2'-O-methyluridine with a 3'-phosphorothioate linkage
  modified_base 2: mod_base = OTHER; note = 2'-fluoroadenosine with a 3'-phosphorothioate linkage
  modified_base 3: mod_base = um
  modified_base 4: mod_base = gm
  modified_base 5: mod_base = OTHER; note = 2'-fluorocytidine
  modified_base 6: mod_base = um
  modified_base 7: mod_base = OTHER; note = 2'-fluoroguanosine
  modified_base 8: mod_base = cm
  modified_base 9: mod_base = um
  modified_base 10: mod_base = gm
  modified_base 11: mod_base = um
  modified_base 12: mod_base = gm
  modified_base 13: mod_base = cm
  modified_base 14: mod_base = OTHER; note = 2'-fluorocytidine
  modified_base 15: mod_base = OTHER; note = 2'-O-methyladenosine
  modified_base 16: mod_base = OTHER; note = 2'-fluorocytidine
  modified_base 17: mod_base = cm
  modified_base 18: mod_base = OTHER; note = 2'-O-methyladenosine
  modified_base 19: mod_base = um
  modified_base 20: mod_base = cm
  modified_base 21: mod_base = OTHER; note = 2'-O-methyluridine with a 3'-phosphorothioate linkage
  modified_base 22: mod_base = OTHER; note = 2'-O-methylcytidine with a 3'-phosphorothioate linkage
  modified_base 23: mod_base = cm
tatgctgctgtgccaccatctcc

SEQ ID NO: 236 - RNA, 23 nt, synthetic construct
  source 1..23: mol_type = other RNA
  modified_base 1: mod_base = OTHER; note = 2'-O-methyluridine with a 3'-phosphorothioate linkage
  modified_base 2: mod_base = OTHER; note = 2'-fluoroguanosine with a 3'-phosphorothioate linkage
  modified_base 3: mod_base = cm
  modified_base 4: mod_base = cm
  modified_base 5: mod_base = OTHER; note = 2'-fluoroguanosine
  modified_base 6: mod_base = OTHER; note = 2'-O-methyladenosine
  modified_base 7: mod_base = OTHER; note = 2'-fluorouridine
  modified_base 8: mod_base = gm
  modified_base 9: mod_base = cm
  modified_base 10: mod_base = um
  modified_base 11: mod_base = gm
  modified_base 12: mod_base = cm
  modified_base 13: mod_base = um
  modified_base 14: mod_base = OTHER; note = 2'-fluoroguanosine
  modified_base 15: mod_base = um
  modified_base 16: mod_base = OTHER; note = 2'-fluoroguanosine
  modified_base 17: mod_base = cm
  modified_base 18: mod_base = cm
  modified_base 19: mod_base = OTHER; note = 2'-O-methyladenosine
  modified_base 20: mod_base = cm
  modified_base 21: mod_base = OTHER; note = 2'-O-methylcytidine with a 3'-phosphorothioate linkage
  modified_base 22: mod_base = OTHER; note = 2'-O-methyladenosine with a 3'-phosphorothioate linkage
  modified_base 23: mod_base = um
tgccgatgctgctgtgccaccat

SEQ ID NO: 237 - RNA, 23 nt, synthetic construct
  source 1..23: mol_type = other RNA
  modified_base 1: mod_base = OTHER; note = 2'-O-methyluridine with a 3'-phosphorothioate linkage
  modified_base 2: mod_base = OTHER; note = 2'-fluoroguanosine with a 3'-phosphorothioate linkage
  modified_base 3: mod_base = um
  modified_base 4: mod_base = cm
  modified_base 5: mod_base = OTHER; note = 2'-fluoroguanosine
  modified_base 6: mod_base = cm
  modified_base 7: mod_base = OTHER; note = 2'-fluoroadenosine
  modified_base 8: mod_base = gm
  modified_base 9: mod_base = cm
  modified_base 10: mod_base = cm
  modified_base 11: mod_base = gm
  modified_base 12: mod_base = OTHER; note = 2'-O-methyladenosine
  modified_base 13: mod_base = um
  modified_base 14: mod_base = OTHER; note = 2'-fluoroguanosine
  modified_base 15: mod_base = cm
  modified_base 16: mod_base = OTHER; note = 2'-fluorouridine
  modified_base 17: mod_base = gm
  modified_base 18: mod_base = cm
  modified_base 19: mod_base = um
  modified_base 20: mod_base = gm
  modified_base 21: mod_base = OTHER; note = 2'-O-methyluridine with a 3'-phosphorothioate linkage
  modified_base 22: mod_base = OTHER; note = 2'-O-methylguanosine with a 3'-phosphorothioate linkage
  modified_base 23: mod_base = cm
tgtcgcagccgatgctgctgtgc

SEQ ID NO: 238 - RNA, 23 nt, synthetic construct
  source 1..23: mol_type = other RNA
  modified_base 1: mod_base = OTHER; note = 2'-O-methyluridine with a 3'-phosphorothioate linkage
  modified_base 2: mod_base = OTHER; note = 2'-fluorouridine with a 3'-phosphorothioate linkage
  modified_base 3: mod_base = gm
  modified_base 4: mod_base = cm
  modified_base 5: mod_base = OTHER; note = 2'-fluorouridine
  modified_base 6: mod_base = um
  modified_base 7: mod_base = OTHER; note = 2'-fluoroguanosine
  modified_base 8: mod_base = um
  modified_base 9: mod_base = cm
  modified_base 10: mod_base = OTHER; note = 2'-O-methyladenosine
  modified_base 11: mod_base = gm
  modified_base 12: mod_base = cm
  modified_base 13: mod_base = gm
  modified_base 14: mod_base = OTHER; note = 2'-fluorouridine
  modified_base 15: mod_base = gm
  modified_base 16: mod_base = OTHER; note = 2'-fluoroadenosine
  modified_base 17: mod_base = gm
  modified_base 18: mod_base = cm
  modified_base 19: mod_base = cm
  modified_base 20: mod_base = um
  modified_base 21: mod_base = OTHER; note = 2'-O-methyluridine with a 3'-phosphorothioate linkage
  modified_base 22: mod_base = OTHER; note = 2'-O-methyluridine with a 3'-phosphorothioate linkage
  modified_base 23: mod_base = OTHER; note = 2'-O-methyladenosine
ttgcttgtcagcgtgagccttta

SEQ ID NO: 239 - RNA, 23 nt, synthetic construct
  source 1..23: mol_type = other RNA
  modified_base 1: mod_base = OTHER; note = 2'-O-methyluridine with a 3'-phosphorothioate linkage
  modified_base 2: mod_base = OTHER; note = 2'-fluorocytidine with a 3'-phosphorothioate linkage
  modified_base 3: mod_base = OTHER; note = 2'-O-methyladenosine
  modified_base 4: mod_base = um
  modified_base 5: mod_base = OTHER; note = 2'-fluorocytidine
  modified_base 6: mod_base = cm
  modified_base 7: mod_base = OTHER; note = 2'-fluoroadenosine
  modified_base 8: mod_base = gm
  modified_base 9: mod_base = gm
  modified_base 10: mod_base = cm
  modified_base 11: mod_base = OTHER; note = 2'-O-methyladenosine
  modified_base 12: mod_base = gm
  modified_base 13: mod_base = OTHER; note = 2'-O-methyladenosine
  modified_base 14: mod_base = OTHER; note = 2'-fluorouridine
  modified_base 15: mod_base = um
  modified_base 16: mod_base = OTHER; note = 2'-fluorocytidine
  modified_base 17: mod_base = OTHER; note = 2'-O-methyladenosine
  modified_base 18: mod_base = gm
  modified_base 19: mod_base = gm
  modified_base 20: mod_base = cm
  modified_base 21: mod_base = OTHER; note = 2'-O-methyluridine with a 3'-phosphorothioate linkage
  modified_base 22: mod_base = OTHER; note = 2'-O-methylguanosine with a 3'-phosphorothioate linkage
  modified_base 23: mod_base = gm
tcatccaggcagattcaggctgg

SEQ ID NO: 240 - RNA, 23 nt, synthetic construct
  source 1..23: mol_type = other RNA
  modified_base 1: mod_base = OTHER; note = 2'-O-methyluridine with a 3'-phosphorothioate linkage
  modified_base 2: mod_base = OTHER; note = 2'-fluorocytidine with a 3'-phosphorothioate linkage
  modified_base 3: mod_base = um
  modified_base 4: mod_base = gm
  modified_base 5: mod_base = OTHER; note = 2'-fluoroguanosine
  modified_base 6: mod_base = OTHER; note = 2'-O-methyladenosine
  modified_base 7: mod_base = OTHER; note = 2'-fluorouridine
  modified_base 8: mod_base = cm
  modified_base 9: mod_base = um
  modified_base 10: mod_base = gm
  modified_base 11: mod_base = um
  modified_base 12: mod_base = cm
  modified_base 13: mod_base = gm
  modified_base 14: mod_base = OTHER; note = 2'-fluorocytidine
  modified_base 15: mod_base = OTHER; note = 2'-O-methyladenosine
  modified_base 16: mod_base = OTHER; note = 2'-fluoroguanosine
  modified_base 17: mod_base = cm
  modified_base 18: mod_base = cm
  modified_base 19: mod_base = gm
  modified_base 20: mod_base = OTHER; note = 2'-O-methyladenosine
  modified_base 21: mod_base = OTHER; note = 2'-O-methyluridine with a 3'-phosphorothioate linkage
  modified_base 22: mod_base = OTHER; note = 2'-O-methylguanosine with a 3'-phosphorothioate linkage
  modified_base 23: mod_base = cm
tctggatctgtcgcagccgatgc

SEQ ID NO: 241 - RNA, 23 nt, synthetic construct
  source 1..23: mol_type = other RNA
  modified_base 1: mod_base = OTHER; note = 2'-O-methyluridine with a 3'-phosphorothioate linkage
  modified_base 2: mod_base = OTHER; note = 2'-fluoroadenosine with a 3'-phosphorothioate linkage
  modified_base 3: mod_base = gm
  modified_base 4: mod_base = gm
  modified_base 5: mod_base = OTHER; note = 2'-fluorocytidine
  modified_base 6: mod_base = gm
  modified_base 7: mod_base = OTHER; note = 2'-fluorocytidine
  modified_base 8: mod_base = um
  modified_base 9: mod_base = cm
  modified_base 10: mod_base = cm
  modified_base 11: mod_base = um
  modified_base 12: mod_base = cm
  modified_base 13: mod_base = OTHER; note = 2'-O-methyladenosine
  modified_base 14: mod_base = OTHER; note = 2'-fluoroguanosine
  modified_base 15: mod_base = cm
  modified_base 16: mod_base = OTHER; note = 2'-fluorouridine
  modified_base 17: mod_base = gm
  modified_base 18: mod_base = gm
  modified_base 19: mod_base = OTHER; note = 2'-O-methyladenosine
  modified_base 20: mod_base = cm
  modified_base 21: mod_base = OTHER; note = 2'-O-methyluridine with a 3'-phosphorothioate linkage
  modified_base 22: mod_base = OTHER; note = 2'-O-methyluridine with a 3'-phosphorothioate linkage
  modified_base 23: mod_base = cm
taggcgctcctcagctggacttc

SEQ ID NO: 242 - RNA, 23 nt, synthetic construct
  source 1..23: mol_type = other RNA
  modified_base 1: mod_base = OTHER; note = 2'-O-methyluridine with a 3'-phosphorothioate linkage
  modified_base 2: mod_base = OTHER; note = 2'-fluoroadenosine with a 3'-phosphorothioate linkage
  modified_base 3: mod_base = cm
  modified_base 4: mod_base = cm
  modified_base 5: mod_base = OTHER; note = 2'-fluoroadenosine
  modified_base 6: mod_base = um
  modified_base 7: mod_base = OTHER; note = 2'-fluorocytidine
  modified_base 8: mod_base = um
  modified_base 9: mod_base = cm
  modified_base 10: mod_base = cm
  modified_base 11: mod_base = cm
  modified_base 12: mod_base = gm
  modified_base 13: mod_base = cm
  modified_base 14: mod_base = OTHER; note = 2'-fluorocytidine
  modified_base 15: mod_base = um
  modified_base 16: mod_base = OTHER; note = 2'-fluorocytidine
  modified_base 17: mod_base = um
  modified_base 18: mod_base = gm
  modified_base 19: mod_base = cm
  modified_base 20: mod_base = cm
  modified_base 21: mod_base = OTHER; note = 2'-O-methylguanosine with a 3'-phosphorothioate linkage
  modified_base 22: mod_base = OTHER; note = 2'-O-methylcytidine with a 3'-phosphorothioate linkage
  modified_base 23: mod_base = um
taccatctcccgcctctgccgct

SEQ ID NO: 243 - RNA, 23 nt, synthetic construct
  source 1..23: mol_type = other RNA
  modified_base 1: mod_base = OTHER; note = 2'-O-methyluridine with a 3'-phosphorothioate linkage
  modified_base 2: mod_base = OTHER; note = 2'-fluoroguanosine with a 3'-phosphorothioate linkage
  modified_base 3: mod_base = gm
  modified_base 4: mod_base = OTHER; note = 2'-O-methyladenosine
  modified_base 5: mod_base = OTHER; note = 2'-fluoroadenosine
  modified_base 6: mod_base = gm
  modified_base 7: mod_base = OTHER; note = 2'-fluorouridine
  modified_base 8: mod_base = gm
  modified_base 9: mod_base = um
  modified_base 10: mod_base = um
  modified_base 11: mod_base = cm
  modified_base 12: mod_base = cm
  modified_base 13: mod_base = um
  modified_base 14: mod_base = OTHER; note = 2'-fluorouridine
  modified_base 15: mod_base = gm
  modified_base 16: mod_base = OTHER; note = 2'-fluorocytidine
  modified_base 17: mod_base = OTHER; note = 2'-O-methyladenosine
  modified_base 18: mod_base = gm
  modified_base 19: mod_base = cm
  modified_base 20: mod_base = OTHER; note = 2'-O-methyladenosine
  modified_base 21: mod_base = OTHER; note = 2'-O-methyluridine with a 3'-phosphorothioate linkage
  modified_base 22: mod_base = OTHER; note = 2'-O-methylguanosine with a 3'-phosphorothioate linkage
  modified_base 23: mod_base = OTHER; note = 2'-O-methyladenosine
tggaagtgttccttgcagcatga

SEQ ID NO: 244 - RNA, 23 nt, synthetic construct
  source 1..23: mol_type = other RNA
  modified_base 1: mod_base = OTHER; note = 2'-O-methyluridine with a 3'-phosphorothioate linkage
  modified_base 2: mod_base = OTHER; note = 2'-fluorouridine with a 3'-phosphorothioate linkage
  modified_base 3: mod_base = cm
  modified_base 4: mod_base = cm
  modified_base 5: mod_base = OTHER; note = 2'-fluoroadenosine
  modified_base 6: mod_base = OTHER; note = 2'-O-methyladenosine
  modified_base 7: mod_base = OTHER; note = 2'-fluorocytidine
  modified_base 8: mod_base = OTHER; note = 2'-O-methyladenosine
  modified_base 9: mod_base = gm
  modified_base 10: mod_base = gm
  modified_base 11: mod_base = cm
  modified_base 12: mod_base = um
  modified_base 13: mod_base = um
  modified_base 14: mod_base = OTHER; note = 2'-fluoroguanosine
  modified_base 15: mod_base = cm
  modified_base 16: mod_base = OTHER; note = 2'-fluorocytidine
  modified_base 17: mod_base = cm
  modified_base 18: mod_base = gm
  modified_base 19: mod_base = OTHER; note = 2'-O-methyladenosine
  modified_base 20: mod_base = OTHER; note = 2'-O-methyladenosine
  modified_base 21: mod_base = OTHER; note = 2'-O-methylguanosine with a 3'-phosphorothioate linkage
  modified_base 22: mod_base = OTHER; note = 2'-O-methyluridine with a 3'-phosphorothioate linkage
  modified_base 23: mod_base = um
ttccaacaggcttgcccgaagtt

SEQ ID NO: 245 - RNA, 23 nt, synthetic construct
  source 1..23: mol_type = other RNA
  modified_base 1: mod_base = OTHER; note = 2'-O-methyluridine with a 3'-phosphorothioate linkage
  modified_base 2: mod_base = OTHER; note = 2'-fluorocytidine with a 3'-phosphorothioate linkage
  modified_base 3: mod_base = cm
  modified_base 4: mod_base = cm
  modified_base 5: mod_base = OTHER; note = 2'-fluoroadenosine
  modified_base 6: mod_base = gm
  modified_base 7: mod_base = OTHER; note = 2'-fluorouridine
  modified_base 8: mod_base = gm
  modified_base 9: mod_base = OTHER; note = 2'-O-methyladenosine
  modified_base 10: mod_base = OTHER; note = 2'-O-methyladenosine
  modified_base 11: mod_base = cm
  modified_base 12: mod_base = OTHER; note = 2'-O-methyladenosine
  modified_base 13: mod_base = gm
  modified_base 14: mod_base = OTHER; note = 2'-fluoroguanosine
  modified_base 15: mod_base = cm
  modified_base 16: mod_base = OTHER; note = 2'-fluoroadenosine
  modified_base 17: mod_base = gm
  modified_base 18: mod_base = cm
  modified_base 19: mod_base = um
  modified_base 20: mod_base = cm
  modified_base 21: mod_base = OTHER; note = 2'-O-methylcytidine with a 3'-phosphorothioate linkage
  modified_base 22: mod_base = OTHER; note = 2'-O-methyluridine with a 3'-phosphorothioate linkage
  modified_base 23: mod_base = cm
tcccagtgaacaggcagctcctc

SEQ ID NO: 246 - RNA, 23 nt, synthetic construct
  source 1..23: mol_type = other RNA
  modified_base 1: mod_base = OTHER; note = 2'-O-methyluridine with a 3'-phosphorothioate linkage
  modified_base 2: mod_base = OTHER; note = 2'-fluoroguanosine with a 3'-phosphorothioate linkage
  modified_base 3: mod_base = um
  modified_base 4: mod_base = cm
  modified_base 5: mod_base = OTHER; note = 2'-fluorocytidine
  modified_base 6: mod_base = um
  modified_base 7: mod_base = OTHER; note = 2'-fluorocytidine
  modified_base 8: mod_base = OTHER; note = 2'-O-methyladenosine
  modified_base 9: mod_base = gm
  modified_base 10: mod_base = um
  modified_base 11: mod_base = um
  modified_base 12: mod_base = cm
  modified_base 13: mod_base = cm
  modified_base 14: mod_base = OTHER; note = 2'-fluoroadenosine
  modified_base 15: mod_base = um
  modified_base 16: mod_base = OTHER; note = 2'-fluorocytidine
  modified_base 17: mod_base = cm
  modified_base 18: mod_base = OTHER; note = 2'-O-methyladenosine
  modified_base 19: mod_base = gm
  modified_base 20: mod_base = gm
  modified_base 21: mod_base = OTHER; note = 2'-O-methylcytidine with a 3'-phosphorothioate linkage
  modified_base 22: mod_base = OTHER; note = 2'-O-methyladenosine with a 3'-phosphorothioate linkage
  modified_base 23: mod_base = gm
tgtcctcagttccatccaggcag

SEQ ID NO: 247 - RNA, 23 nt, synthetic construct
  source 1..23: mol_type = other RNA
  modified_base 1: mod_base = OTHER; note = 2'-O-methyluridine with a 3'-phosphorothioate linkage
  modified_base 2: mod_base = OTHER; note = 2'-fluoroguanosine with a 3'-phosphorothioate linkage
  modified_base 3: mod_base = gm
  modified_base 4: mod_base = gm
  modified_base 5: mod_base = OTHER; note = 2'-fluorocytidine
  modified_base 6: mod_base = gm
  modified_base 7: mod_base = OTHER; note = 2'-fluorouridine
  modified_base 8: mod_base = gm
  modified_base 9: mod_base = gm
  modified_base 10: mod_base = OTHER; note = 2'-O-methyladenosine
  modified_base 11: mod_base = OTHER; note = 2'-O-methyladenosine
  modified_base 12: mod_base = gm
  modified_base 13: mod_base = um
  modified_base 14: mod_base = OTHER; note = 2'-fluoroguanosine
  modified_base 15: mod_base = um
  modified_base 16: mod_base = OTHER; note = 2'-fluorouridine
  modified_base 17: mod_base = cm
  modified_base 18: mod_base = cm
  modified_base 19: mod_base = um
  modified_base 20: mod_base = um
  modified_base 21: mod_base = OTHER; note = 2'-O-methylguanosine with a 3'-phosphorothioate linkage
  modified_base 22: mod_base = OTHER; note = 2'-O-methylcytidine with a 3'-phosphorothioate linkage
  modified_base 23: mod_base = OTHER; note = 2'-O-methyladenosine
tgggcgtggaagtgttccttgca

SEQ ID NO: 248 - RNA, 23 nt, synthetic construct
  source 1..23: mol_type = other RNA
  modified_base 1: mod_base = OTHER; note = 2'-O-methyluridine with a 3'-phosphorothioate linkage
  modified_base 2: mod_base = OTHER; note = 2'-fluorocytidine with a 3'-phosphorothioate linkage
  modified_base 3: mod_base = cm
  modified_base 4: mod_base = um
  modified_base 5: mod_base = OTHER; note = 2'-fluorocytidine
  modified_base 6: mod_base = OTHER; note = 2'-O-methyladenosine
  modified_base 7: mod_base = OTHER; note = 2'-fluoroguanosine
  modified_base 8: mod_base = cm
  modified_base 9: mod_base = um
  modified_base 10: mod_base = gm
  modified_base 11: mod_base = gm
  modified_base 12: mod_base = OTHER; note = 2'-O-methyladenosine
  modified_base 13: mod_base = cm
  modified_base 14: mod_base = OTHER; note = 2'-fluorouridine
  modified_base 15: mod_base = um
  modified_base 16: mod_base = OTHER; note = 2'-fluorocytidine
  modified_base 17: mod_base = um
  modified_base 18: mod_base = OTHER; note = 2'-O-methyladenosine
  modified_base 19: mod_base = gm
  modified_base 20: mod_base = cm
  modified_base 21: mod_base = OTHER; note = 2'-O-methylcytidine with a 3'-phosphorothioate linkage
  modified_base 22: mod_base = OTHER; note = 2'-O-methylguanosine with a 3'-phosphorothioate linkage
  modified_base 23: mod_base = cm
tcctcagctggacttctagccgc

SEQ ID NO: 249 - RNA, 23 nt, synthetic construct
  source 1..23: mol_type = other RNA
  modified_base 1: mod_base = OTHER; note = 2'-O-methyluridine with a 3'-phosphorothioate linkage
  modified_base 2: mod_base = OTHER; note = 2'-fluorocytidine with a 3'-phosphorothioate linkage
  modified_base 3: mod_base = gm
  modified_base 4: mod_base = um
  modified_base 5: mod_base = OTHER; note = 2'-fluoroguanosine
  modified_base 6: mod_base = OTHER; note = 2'-O-methyladenosine
  modified_base 7: mod_base = OTHER; note = 2'-fluoroguanosine
  modified_base 8: mod_base = cm
  modified_base 9: mod_base = cm
  modified_base 10: mod_base = um
  modified_base 11: mod_base = um
  modified_base 12: mod_base = um
  modified_base 13: mod_base = OTHER; note = 2'-O-methyladenosine
  modified_base 14: mod_base = OTHER; note = 2'-fluoroadenosine
  modified_base 15: mod_base = gm
  modified_base 16: mod_base = OTHER; note = 2'-fluoroadenosine
  modified_base 17: mod_base = cm
  modified_base 18: mod_base = cm
  modified_base 19: mod_base = um
  modified_base 20: mod_base = cm
  modified_base 21: mod_base = OTHER; note = 2'-O-methyladenosine with a 3'-phosphorothioate linkage
  modified_base 22: mod_base = OTHER; note = 2'-O-methyladenosine with a 3'-phosphorothioate linkage
  modified_base 23: mod_base = OTHER; note = 2'-O-methyladenosine
tcgtgagcctttaagacctcaaa

SEQ ID NO: 250 - RNA, 23 nt, synthetic construct
  source 1..23: mol_type = other RNA
  modified_base 1: mod_base = OTHER; note = 2'-O-methyluridine with a 3'-phosphorothioate linkage
  modified_base 2: mod_base = OTHER; note = 2'-fluoroadenosine with a 3'-phosphorothioate linkage
  modified_base 3: mod_base = gm
  modified_base 4: mod_base = um
  modified_base 5: mod_base = OTHER; note = 2'-fluorocytidine
  modified_base 6: mod_base = um
  modified_base 7: mod_base = OTHER; note = 2'-fluorocytidine
  modified_base 8: mod_base = cm
  modified_base 9: mod_base = OTHER; note = 2'-O-methyladenosine
  modified_base 10: mod_base = OTHER; note = 2'-O-methyladenosine
  modified_base 11: mod_base = cm
  modified_base 12: mod_base = OTHER; note = 2'-O-methyladenosine
  modified_base 13: mod_base = gm
  modified_base 14: mod_base = OTHER; note = 2'-fluoroguanosine
  modified_base 15: mod_base = cm
  modified_base 16: mod_base = OTHER; note = 2'-fluorouridine
  modified_base 17: mod_base = um
  modified_base 18: mod_base = gm
  modified_base 19: mod_base = cm
  modified_base 20: mod_base = cm
  modified_base 21: mod_base = OTHER; note = 2'-O-methylcytidine with a 3'-phosphorothioate linkage
  modified_base 22: mod_base = OTHER; note = 2'-O-methylguanosine with a 3'-phosphorothioate linkage
  modified_base 23: mod_base = OTHER; note = 2'-O-methyladenosine
tagtctccaacaggcttgcccga

SEQ ID NO: 251 - RNA, 23 nt, synthetic construct
  source 1..23: mol_type = other RNA
  modified_base 1: mod_base = OTHER; note = 2'-O-methyluridine with a 3'-phosphorothioate linkage
  modified_base 2: mod_base = OTHER; note = 2'-fluorouridine with a 3'-phosphorothioate linkage
  modified_base 3: mod_base = cm
  modified_base 4: mod_base = OTHER; note = 2'-O-methyladenosine
  modified_base 5: mod_base = OTHER; note = 2'-fluoroguanosine
  modified_base 6: mod_base = cm
  modified_base 7: mod_base = OTHER; note = 2'-fluorouridine
  modified_base 8: mod_base = gm
  modified_base 9: mod_base = gm
  modified_base 10: mod_base = OTHER; note = 2'-O-methyladenosine
  modified_base 11: mod_base = cm
  modified_base 12: mod_base = um
  modified_base 13: mod_base = um
  modified_base 14: mod_base = OTHER; note = 2'-fluorocytidine
  modified_base 15: mod_base = um
  modified_base 16: mod_base = OTHER; note = 2'-fluoroadenosine
  modified_base 17: mod_base = gm
  modified_base 18: mod_base = cm
  modified_base 19: mod_base = cm
  modified_base 20: mod_base = gm
  modified_base 21: mod_base = OTHER; note = 2'-O-methylcytidine with a 3'-phosphorothioate linkage
  modified_base 22: mod_base = OTHER; note = 2'-O-methyluridine with a 3'-phosphorothioate linkage
  modified_base 23: mod_base = gm
ttcagctggacttctagccgctg

SEQ ID NO: 252 - RNA, 23 nt, synthetic construct
  source 1..23: mol_type = other RNA
  modified_base 1: mod_base = OTHER; note = 2'-O-methyluridine with a 3'-phosphorothioate linkage
  modified_base 2: mod_base = OTHER; note = 2'-fluorocytidine with a 3'-phosphorothioate linkage
  modified_base 3: mod_base = OTHER; note = 2'-O-methyladenosine
  modified_base 4: mod_base = gm
  modified_base 5: mod_base = OTHER; note = 2'-fluorocytidine
  modified_base 6: mod_base = cm
  modified_base 7: mod_base = OTHER; note = 2'-fluoroguanosine
  modified_base 8: mod_base = OTHER; note = 2'-O-methyladenosine
  modified_base 9: mod_base = um
  modified_base 10: mod_base = gm
  modified_base 11: mod_base = cm
  modified_base 12: mod_base = um
  modified_base 13: mod_base = gm
  modified_base 14: mod_base = OTHER; note = 2'-fluorocytidine
  modified_base 15: mod_base = um
  modified_base 16: mod_base = OTHER; note = 2'-fluoroguanosine
  modified_base 17: mod_base = um
  modified_base 18: mod_base = gm
  modified_base 19: mod_base = cm
  modified_base 20: mod_base = cm
  modified_base 21: mod_base = OTHER; note = 2'-O-methyladenosine with a 3'-phosphorothioate linkage
  modified_base 22: mod_base = OTHER; note = 2'-O-methylcytidine with a 3'-phosphorothioate linkage
  modified_base 23: mod_base = cm
tcagccgatgctgctgtgccacc

SEQ ID NO: 253 - RNA, 23 nt, synthetic construct
  source 1..23: mol_type = other RNA
  modified_base 1: mod_base = OTHER; note = 2'-O-methyluridine with a 3'-phosphorothioate linkage
  modified_base 2: mod_base = OTHER; note = 2'-fluorocytidine with a 3'-phosphorothioate linkage
  modified_base 3: mod_base = gm
  modified_base 4: mod_base = OTHER; note = 2'-O-methyladenosine
  modified_base 5: mod_base = OTHER; note = 2'-fluorouridine
  modified_base 6: mod_base = gm
  modified_base 7: mod_base = OTHER; note = 2'-fluorocytidine
  modified_base 8: mod_base = um
  modified_base 9: mod_base = gm
  modified_base 10: mod_base = cm
  modified_base 11: mod_base = um
  modified_base 12: mod_base = gm
  modified_base 13: mod_base = um
  modified_base 14: mod_base = OTHER; note = 2'-fluoroguanosine
  modified_base 15: mod_base = cm
  modified_base 16: mod_base = OTHER; note = 2'-fluorocytidine
  modified_base 17: mod_base = OTHER; note = 2'-O-methyladenosine
  modified_base 18: mod_base = cm
  modified_base 19: mod_base = cm
  modified_base 20: mod_base = OTHER; note = 2'-O-methyladenosine
  modified_base 21: mod_base = OTHER; note = 2'-O-methyluridine with a 3'-phosphorothioate linkage
  modified_base 22: mod_base = OTHER; note = 2'-O-methylcytidine with a 3'-phosphorothioate linkage
  modified_base 23: mod_base = um
tcgatgctgctgtgccaccatct

SEQ ID NO: 254 - RNA, 23 nt, synthetic construct
  source 1..23: mol_type = other RNA
  modified_base 1: mod_base = OTHER; note = 2'-O-methyluridine with a 3'-phosphorothioate linkage
  modified_base 2: mod_base = OTHER; note = 2'-fluorocytidine with a 3'-phosphorothioate linkage
  modified_base 3: mod_base = cm
  modified_base 4: mod_base = um
  modified_base 5: mod_base = OTHER; note = 2'-fluorouridine
  modified_base 6: mod_base = um
  modified_base 7: mod_base = OTHER; note = 2'-fluoroadenosine
  modified_base 8: mod_base = OTHER; note = 2'-O-methyladenosine
  modified_base 9: mod_base = gm
  modified_base 10: mod_base = OTHER; note = 2'-O-methyladenosine
  modified_base 11: mod_base = cm
  modified_base 12: mod_base = cm
  modified_base 13: mod_base = um
  modified_base 14: mod_base = OTHER; note = 2'-fluorocytidine
  modified_base 15: mod_base = OTHER; note = 2'-O-methyladenosine
  modified_base 16: mod_base = OTHER; note = 2'-fluoroadenosine
  modified_base 17: mod_base = OTHER; note = 2'-O-methyladenosine
  modified_base 18: mod_base = um
  modified_base 19: mod_base = um
  modified_base 20: mod_base = cm
  modified_base 21: mod_base = OTHER; note = 2'-O-methyluridine with a 3'-phosphorothioate linkage
  modified_base 22: mod_base = OTHER; note = 2'-O-methylcytidine with a 3'-phosphorothioate linkage
  modified_base 23: mod_base = gm
tcctttaagacctcaaattctcg

SEQ ID NO: 255 - RNA, 23 nt, synthetic construct
  source 1..23: mol_type = other RNA
  modified_base 1: mod_base = OTHER; note = 2'-O-methyluridine with a 3'-phosphorothioate linkage
  modified_base 2: mod_base = OTHER; note = 2'-fluoroadenosine with a 3'-phosphorothioate linkage
  modified_base 3: mod_base = um
  modified_base 4: mod_base = OTHER; note = 2'-O-methyladenosine
  modified_base 5: mod_base = OTHER; note = 2'-fluoroguanosine
  modified_base 6: mod_base = OTHER; note = 2'-O-methyladenosine
  modified_base 7: mod_base = OTHER; note = 2'-fluoroguanosine
  modified_base 8: mod_base = OTHER; note = 2'-O-methyladenosine
  modified_base 9: mod_base = cm
  modified_base 10: mod_base = cm
  modified_base 11: mod_base = cm
  modified_base 12: mod_base = OTHER; note = 2'-O-methyladenosine
  modified_base 13: mod_base = gm
  modified_base 14: mod_base = OTHER; note = 2'-fluoroguanosine
  modified_base 15: mod_base = cm
  modified_base 16: mod_base = OTHER; note = 2'-fluorouridine
  modified_base 17: mod_base = gm
  modified_base 18: mod_base = um
  modified_base 19: mod_base = um
  modified_base 20: mod_base = cm
  modified_base 21: mod_base = OTHER; note = 2'-O-methylcytidine with a 3'-phosphorothioate linkage
  modified_base 22: mod_base = OTHER; note = 2'-O-methyluridine with a 3'-phosphorothioate linkage
  modified_base 23: mod_base = gm
tatagagacccaggctgttcctg

SEQ ID NO: 256 - RNA, 23 nt, synthetic construct
  source 1..23: mol_type = other RNA
  modified_base 1: mod_base = OTHER; note = 2'-O-methyluridine with a 3'-phosphorothioate linkage
  modified_base 2: mod_base = OTHER; note = 2'-fluorocytidine with a 3'-phosphorothioate linkage
  modified_base 3: mod_base = um
  modified_base 4: mod_base = gm
  modified_base 5: mod_base = OTHER; note = 2'-fluorocytidine
  modified_base 6: mod_base = um
  modified_base 7: mod_base = OTHER; note = 2'-fluorouridine
  modified_base 8: mod_base = gm
  modified_base 9: mod_base = um
  modified_base 10: mod_base = cm
  modified_base 11: mod_base = OTHER; note = 2'-O-methyladenosine
  modified_base 12: mod_base = gm
  modified_base 13: mod_base = cm
  modified_base 14: mod_base = OTHER; note = 2'-fluoroguanosine
  modified_base 15: mod_base = um
  modified_base 16: mod_base = OTHER; note = 2'-fluoroguanosine
  modified_base 17: mod_base = OTHER; note = 2'-O-methyladenosine
  modified_base 18: mod_base = gm
  modified_base 19: mod_base = cm
  modified_base 20: mod_base = cm
  modified_base 21: mod_base = OTHER; note = 2'-O-methyluridine with a 3'-phosphorothioate linkage
  modified_base 22: mod_base = OTHER; note = 2'-O-methyluridine with a 3'-phosphorothioate linkage
  modified_base 23: mod_base = um
tctgcttgtcagcgtgagccttt

SEQ ID NO: 257 - RNA, 23 nt, synthetic construct
  source 1..23: mol_type = other RNA
  modified_base 1: mod_base = OTHER; note = 2'-O-methyluridine with a 3'-phosphorothioate linkage
  modified_base 2: mod_base = OTHER; note = 2'-fluoroguanosine with a 3'-phosphorothioate linkage
  modified_base 3: mod_base = cm
  modified_base 4: mod_base = OTHER; note = 2'-O-methyladenosine
  modified_base 5: mod_base = OTHER; note = 2'-fluoroguanosine
  modified_base 6: mod_base = cm
  modified_base 7: mod_base = OTHER; note = 2'-fluorocytidine
  modified_base 8: mod_base = gm
  modified_base 9: mod_base = OTHER; note = 2'-O-methyladenosine
  modified_base 10: mod_base = um
  modified_base 11: mod_base = gm
  modified_base 12: mod_base = cm
  modified_base 13: mod_base = um
  modified_base 14: mod_base = OTHER; note = 2'-fluoroguanosine
  modified_base 15: mod_base = cm
  modified_base 16: mod_base = OTHER; note = 2'-fluorouridine
  modified_base 17: mod_base = gm
  modified_base 18: mod_base = um
  modified_base 19: mod_base = gm
  modified_base 20: mod_base = cm
  modified_base 21: mod_base = OTHER; note = 2'-O-methylcytidine with a 3'-phosphorothioate linkage
  modified_base 22: mod_base = OTHER; note = 2'-O-methyladenosine with a 3'-phosphorothioate linkage
  modified_base 23: mod_base = cm
tgcagccgatgctgctgtgccac

SEQ ID NO: 258 - RNA, 23 nt, synthetic construct
  source 1..23: mol_type = other RNA
  modified_base 1: mod_base = OTHER; note = 2'-O-methyluridine with a 3'-phosphorothioate linkage
  modified_base 2: mod_base = OTHER; note = 2'-fluoroguanosine with a 3'-phosphorothioate linkage
  modified_base 3: mod_base = um
  modified_base 4: mod_base = cm
  modified_base 5: mod_base = OTHER; note = 2'-fluorouridine
  modified_base 6: mod_base = cm
  modified_base 7: mod_base = OTHER; note = 2'-fluorocytidine
  modified_base 8: mod_base = OTHER; note = 2'-O-methyladenosine
  modified_base 9: mod_base = OTHER; note = 2'-O-methyladenosine
  modified_base 10: mod_base = cm
  modified_base 11: mod_base = OTHER; note = 2'-O-methyladenosine
  modified_base 12: mod_base = gm
  modified_base 13: mod_base = gm
  modified_base 14: mod_base = OTHER; note = 2'-fluorocytidine
  modified_base 15: mod_base = um
  modified_base 16: mod_base = OTHER; note = 2'-fluorouridine
  modified_base 17: mod_base = gm
  modified_base 18: mod_base = cm
  modified_base 19: mod_base = cm
  modified_base 20: mod_base = cm
  modified_base 21: mod_base = OTHER; note = 2'-O-methylguanosine with a 3'-phosphorothioate linkage
  modified_base 22: mod_base = OTHER; note = 2'-O-methyladenosine with a 3'-phosphorothioate linkage
  modified_base 23: mod_base = OTHER; note = 2'-O-methyladenosine
tgtctccaacaggcttgcccgaa

SEQ ID NO: 259 - RNA, 23 nt, synthetic construct
  source 1..23: mol_type = other RNA
  modified_base 1: mod_base = OTHER; note = 2'-O-methyluridine with a 3'-phosphorothioate linkage
  modified_base 2: mod_base = OTHER; note = 2'-fluoroguanosine with a 3'-phosphorothioate linkage
  modified_base 3: mod_base = cm
  modified_base 4: mod_base = um
  modified_base 5: mod_base = OTHER; note = 2'-fluorouridine
  modified_base 6: mod_base = gm
  modified_base 7: mod_base = OTHER; note = 2'-fluorouridine
  modified_base 8: mod_base = cm
  modified_base 9: mod_base = OTHER; note = 2'-O-methyladenosine
  modified_base 10: mod_base = gm
  modified_base 11: mod_base = cm
  modified_base 12: mod_base = gm
  modified_base 13: mod_base = um
  modified_base 14: mod_base = OTHER; note = 2'-fluoroguanosine
  modified_base 15: mod_base = OTHER; note = 2'-O-methyladenosine
  modified_base 16: mod_base = OTHER; note = 2'-fluoroguanosine
  modified_base 17: mod_base = cm
  modified_base 18: mod_base = cm
  modified_base 19: mod_base = um
  modified_base 20: mod_base = um
  modified_base 21: mod_base = OTHER; note = 2'-O-methyluridine with a 3'-phosphorothioate linkage
  modified_base 22: mod_base = OTHER; note = 2'-O-methyladenosine with a 3'-phosphorothioate linkage
  modified_base 23: mod_base = OTHER; note = 2'-O-methyladenosine
tgcttgtcagcgtgagcctttaa

SEQ ID NO: 260 - RNA, 23 nt, synthetic construct
  source 1..23: mol_type = other RNA
  modified_base 1: mod_base = OTHER; note = 2'-O-methyluridine with a 3'-phosphorothioate linkage
  modified_base 2: mod_base = OTHER; note = 2'-fluoroadenosine with a 3'-phosphorothioate linkage
  modified_base 3: mod_base = gm
  modified_base 4: mod_base = um
  modified_base 5: mod_base = OTHER; note = 2'-fluorouridine
  modified_base 6: mod_base = cm
  modified_base 7: mod_base = OTHER; note = 2'-fluorocytidine
  modified_base 8: mod_base = OTHER; note = 2'-O-methyladenosine
  modified_base 9: mod_base = um
  modified_base 10: mod_base = cm
  modified_base 11: mod_base = cm
  modified_base 12: mod_base = OTHER; note = 2'-O-methyladenosine
  modified_base 13: mod_base = gm
  modified_base 14: mod_base = OTHER; note = 2'-fluoroguanosine
  modified_base 15: mod_base = cm
  modified_base 16: mod_base = OTHER; note = 2'-fluoroadenosine
  modified_base 17: mod_base = gm
  modified_base 18: mod_base = OTHER; note = 2'-O-methyladenosine
  modified_base 19: mod_base = um
  modified_base 20: mod_base = um
  modified_base 21: mod_base = OTHER; note = 2'-O-methylcytidine with a 3'-phosphorothioate linkage
  modified_base 22: mod_base = OTHER; note = 2'-O-methyladenosine with a 3'-phosphorothioate linkage
  modified_base 23: mod_base = gm
tagttccatccaggcagattcag

SEQ ID NO: 261 - RNA, 23 nt, synthetic construct
  source 1..23: mol_type = other RNA
  modified_base 1: mod_base = OTHER; note = 2'-O-methyluridine with a 3'-phosphorothioate linkage
  modified_base 2: mod_base = OTHER; note = 2'-fluoroguanosine with a 3'-phosphorothioate linkage
  modified_base 3: mod_base = gm
  modified_base 4: mod_base = cm
  modified_base 5: mod_base = OTHER; note = 2'-fluorouridine
  modified_base 6: mod_base = gm
  modified_base 7: mod_base = OTHER; note = 2'-fluoroadenosine
  modified_base 8: mod_base = um
  modified_base 9: mod_base = cm
  modified_base 10: mod_base = cm
  modified_base 11: mod_base = cm
  modified_base 12: mod_base = OTHER; note = 2'-O-methyladenosine
  modified_base 13: mod_base = gm
  modified_base 14: mod_base = OTHER; note = 2'-fluorouridine
  modified_base 15: mod_base = gm
  modified_base 16: mod_base = OTHER; note = 2'-fluoroadenosine
  modified_base 17: mod_base = OTHER; note = 2'-O-methyladenosine
  modified_base 18: mod_base = cm
  modified_base 19: mod_base = OTHER; note = 2'-O-methyladenosine
  modified_base 20: mod_base = gm
  modified_base 21: mod_base = OTHER; note = 2'-O-methylguanosine with a 3'-phosphorothioate linkage
  modified_base 22: mod_base = OTHER; note = 2'-O-methylcytidine with a 3'-phosphorothioate linkage
  modified_base 23: mod_base = OTHER; note = 2'-O-methyladenosine
tggctgatcccagtgaacaggca

SEQ ID NO: 262 - RNA, 23 nt, synthetic construct
  source 1..23: mol_type = other RNA
  modified_base 1: mod_base = OTHER; note = 2'-O-methyluridine with a 3'-phosphorothioate linkage
  modified_base 2: mod_base = OTHER; note = 2'-fluorouridine with a 3'-phosphorothioate linkage
  modified_base 3: mod_base = gm
  modified_base 4: mod_base = cm
  modified_base 5: mod_base = OTHER; note = 2'-fluorocytidine
  modified_base 6: mod_base = OTHER; note = 2'-O-methyladenosine
  modified_base 7: mod_base = OTHER; note = 2'-fluorocytidine
  modified_base 8: mod_base = gm
  modified_base 9: mod_base = OTHER; note = 2'-O-methyladenosine
  modified_base 10: mod_base = cm
  modified_base 11: mod_base = um
  modified_base 12: mod_base = cm
  modified_base 13: mod_base = um
  modified_base 14: mod_base = OTHER; note = 2'-fluoroguanosine
  modified_base 15: mod_base = cm
  modified_base 16: mod_base = OTHER; note = 2'-fluorouridine
  modified_base 17: mod_base = um
  modified_base 18: mod_base = um
  modified_base 19: mod_base = OTHER; note = 2'-O-methyladenosine
  modified_base 20: mod_base = OTHER; note = 2'-O-methyladenosine
  modified_base 21: mod_base = OTHER; note = 2'-O-methyluridine with a 3'-phosphorothioate linkage
  modified_base 22: mod_base = OTHER; note = 2'-O-methylguanosine with a 3'-phosphorothioate linkage
  modified_base 23: mod_base = OTHER; note = 2'-O-methyladenosine
ttgccacgactctgctttaatga

SEQ ID NO: 263 - RNA, 23 nt, synthetic construct
  source 1..23: mol_type = other RNA
  modified_base 1: mod_base = OTHER; note = 2'-O-methyluridine with a 3'-phosphorothioate linkage
  modified_base 2: mod_base = OTHER; note = 2'-fluorocytidine with a 3'-phosphorothioate linkage
  modified_base 3: mod_base = cm
  modified_base 4: mod_base = gm
  modified_base 5: mod_base = OTHER; note = 2'-fluoroadenosine
  modified_base 6: mod_base = um
  modified_base 7: mod_base = OTHER; note = 2'-fluoroguanosine
  modified_base 8: mod_base = cm
  modified_base 9: mod_base = um
  modified_base 10: mod_base = gm
  modified_base 11: mod_base = cm
  modified_base 12: mod_base = um
  modified_base 13: mod_base = gm
  modified_base 14: mod_base = OTHER; note = 2'-fluorouridine
  modified_base 15: mod_base = gm
  modified_base 16: mod_base = OTHER; note = 2'-fluorocytidine
  modified_base 17: mod_base = cm
  modified_base 18: mod_base = OTHER; note = 2'-O-methyladenosine
  modified_base 19: mod_base = cm
  modified_base 20: mod_base = cm
  modified_base 21: mod_base = OTHER; note = 2'-O-methyladenosine with a 3'-phosphorothioate linkage
  modified_base 22: mod_base = OTHER; note = 2'-O-methyluridine with a 3'-phosphorothioate linkage
  modified_base 23: mod_base = cm
tccgatgctgctgtgccaccatc

SEQ ID NO: 264 - RNA, 23 nt, synthetic construct
  source 1..23: mol_type = other RNA
  modified_base 1: mod_base = OTHER; note = 2'-O-methyluridine with a 3'-phosphorothioate linkage
  modified_base 2: mod_base = OTHER; note = 2'-fluorocytidine with a 3'-phosphorothioate linkage
  modified_base 3: mod_base = OTHER; note = 2'-O-methyladenosine
  modified_base 4: mod_base = gm
  modified_base 5: mod_base = OTHER; note = 2'-fluorocytidine
  modified_base 6: mod_base = um
  modified_base 7: mod_base = OTHER; note = 2'-fluoroguanosine
  modified_base 8: mod_base = cm
  modified_base 9: mod_base = OTHER; note = 2'-O-methyladenosine
  modified_base 10: mod_base = gm
  modified_base 11: mod_base = OTHER; note = 2'-O-methyladenosine
  modified_base 12: mod_base = OTHER; note = 2'-O-methyladenosine
  modified_base 13: mod_base = um
  modified_base 14: mod_base = OTHER; note = 2'-fluoroadenosine
  modified_base 15: mod_base = um
  modified_base 16: mod_base = OTHER; note = 2'-fluorocytidine
  modified_base 17: mod_base = cm
  modified_base 18: mod_base = um
  modified_base 19: mod_base = cm
  modified_base 20: mod_base = cm
  modified_base 21: mod_base = OTHER; note = 2'-O-methyluridine with a 3'-phosphorothioate linkage
  modified_base 22: mod_base = OTHER; note = 2'-O-methylcytidine with a 3'-phosphorothioate linkage
  modified_base 23: mod_base = cm
tcagctgcagaatatcctcctcc

SEQ ID NO: 265 - RNA, 23 nt, synthetic construct
  source 1..23: mol_type = other RNA
  modified_base 1: mod_base = OTHER; note = 2'-O-methyluridine with a 3'-phosphorothioate linkage
  modified_base 2: mod_base = OTHER; note = 2'-fluoroguanosine with a 3'-phosphorothioate linkage
  modified_base 3: mod_base = um
  modified_base 4: mod_base = gm
  modified_base 5: mod_base = OTHER; note = 2'-fluoroadenosine
  modified_base 6: mod_base = gm
  modified_base 7: mod_base = OTHER; note = 2'-fluorocytidine
  modified_base 8: mod_base = cm
  modified_base 9: mod_base = um
  modified_base 10: mod_base = um
  modified_base 11: mod_base = um
  modified_base 12: mod_base = OTHER; note = 2'-O-methyladenosine
  modified_base 13: mod_base = OTHER; note = 2'-O-methyladenosine
  modified_base 14: mod_base = OTHER; note = 2'-fluoroguanosine
  modified_base 15: mod_base = OTHER; note = 2'-O-methyladenosine
  modified_base 16: mod_base = OTHER; note = 2'-fluorocytidine
  modified_base 17: mod_base = cm
  modified_base 18: mod_base = um
  modified_base 19: mod_base = cm
  modified_base 20: mod_base = OTHER; note = 2'-O-methyladenosine
  modified_base 21: mod_base = OTHER; note = 2'-O-methyladenosine with a 3'-phosphorothioate linkage
  modified_base 22: mod_base = OTHER; note = 2'-O-methyladenosine with a 3'-phosphorothioate linkage
  modified_base 23: mod_base = um
tgtgagcctttaagacctcaaat

SEQ ID NO: 266 - RNA, 23 nt, synthetic construct
  source 1..23: mol_type = other RNA
  modified_base 1: mod_base = OTHER; note = 2'-O-methyluridine with a 3'-phosphorothioate linkage
  modified_base 2: mod_base = OTHER; note = 2'-fluorocytidine with a 3'-phosphorothioate linkage
  modified_base 3: mod_base = um
  modified_base 4: mod_base = um
  modified_base 5: mod_base = OTHER; note = 2'-fluoroguanosine
  modified_base 6: mod_base = cm
  modified_base 7: mod_base = OTHER; note = 2'-fluorocytidine
  modified_base 8: mod_base = cm
  modified_base 9: mod_base = gm
  modified_base 10: mod_base = OTHER; note = 2'-O-methyladenosine
  modified_base 11: mod_base = OTHER; note = 2'-O-methyladenosine
  modified_base 12: mod_base = gm
  modified_base 13: mod_base = um
  modified_base 14: mod_base = OTHER; note = 2'-fluorouridine
  modified_base 15: mod_base = cm
  modified_base 16: mod_base = OTHER; note = 2'-fluorocytidine
  modified_base 17: mod_base = um
  modified_base 18: mod_base = gm
  modified_base 19: mod_base = gm
  modified_base 20: mod_base = gm
  modified_base 21: mod_base = OTHER; note = 2'-O-methylcytidine with a 3'-phosphorothioate linkage
  modified_base 22: mod_base = OTHER; note = 2'-O-methyluridine with a 3'-phosphorothioate linkage
  modified_base 23: mod_base = gm
tcttgcccgaagttcctgggctg

SEQ ID NO: 267 - RNA, 23 nt, synthetic construct
  source 1..23: mol_type = other RNA
  modified_base 1: mod_base = OTHER; note = 2'-O-methyluridine with a 3'-phosphorothioate linkage
  modified_base 2: mod_base = OTHER; note = 2'-fluoroguanosine with a 3'-phosphorothioate linkage
  modified_base 3: mod_base = cm
  modified_base 4: mod_base = um
  modified_base 5: mod_base = OTHER; note = 2'-fluorocytidine
  modified_base 6: mod_base = cm
  modified_base 7: mod_base = OTHER; note = 2'-fluorouridine
  modified_base 8: mod_base = cm
  modified_base 9: mod_base = OTHER; note = 2'-O-methyladenosine
  modified_base 10: mod_base = gm
  modified_base 11: mod_base = cm
  modified_base 12: mod_base = um
  modified_base 13: mod_base = gm
  modified_base 14: mod_base = OTHER; note = 2'-fluoroguanosine
  modified_base 15: mod_base = OTHER; note = 2'-O-methyladenosine
  modified_base 16: mod_base = OTHER; note = 2'-fluorocytidine
  modified_base 17: mod_base = um
  modified_base 18: mod_base = um
  modified_base 19: mod_base = cm
  modified_base 20: mod_base = um
  modified_base 21: mod_base = OTHER; note = 2'-O-methyladenosine with a 3'-phosphorothioate linkage
  modified_base 22: mod_base = OTHER; note = 2'-O-methylguanosine with a 3'-phosphorothioate linkage
  modified_base 23: mod_base = cm
tgctcctcagctggacttctagc

SEQ ID NO: 268 - RNA, 23 nt, synthetic construct
  source 1..23: mol_type = other RNA
  modified_base 1: mod_base = OTHER; note = 2'-O-methyluridine with a 3'-phosphorothioate linkage
  modified_base 2: mod_base = OTHER; note = 2'-fluorouridine with a 3'-phosphorothioate linkage
  modified_base 3: mod_base = gm
  modified_base 4: mod_base = OTHER; note = 2'-O-methyladenosine
  modified_base 5: mod_base = OTHER; note = 2'-fluorouridine
  modified_base 6: mod_base = cm
  modified_base 7: mod_base = OTHER; note = 2'-fluorocytidine
  modified_base 8: mod_base = cm
  modified_base 9: mod_base = OTHER; note = 2'-O-methyladenosine
  modified_base 10: mod_base = gm
  modified_base 11: mod_base = um
  modified_base 12: mod_base = gm
  modified_base 13: mod_base = OTHER; note = 2'-O-methyladenosine
  modified_base 14: mod_base = OTHER; note = 2'-fluoroadenosine
  modified_base 15: mod_base = cm
  modified_base 16: mod_base = OTHER; note = 2'-fluoroadenosine
  modified_base 17: mod_base = gm
  modified_base 18: mod_base = gm
  modified_base 19: mod_base = cm
  modified_base 20: mod_base = OTHER; note = 2'-O-methyladenosine
  modified_base 21: mod_base = OTHER; note = 2'-O-methylguanosine with a 3'-phosphorothioate linkage
  modified_base 22: mod_base = OTHER; note = 2'-O-methylcytidine with a 3'-phosphorothioate linkage
  modified_base 23: mod_base = um
ttgatcccagtgaacaggcagct

SEQ ID NO: 269 - RNA, 23 nt, synthetic construct
  source 1..23: mol_type = other RNA
  modified_base 1: mod_base = OTHER; note = 2'-O-methyluridine with a 3'-phosphorothioate linkage
  modified_base 2: mod_base = OTHER; note = 2'-fluorocytidine with a 3'-phosphorothioate linkage
  modified_base 3: mod_base = um
  modified_base 4: mod_base = cm
  modified_base 5: mod_base = OTHER; note = 2'-fluoroadenosine
  modified_base 6: mod_base = gm
  modified_base 7: mod_base = OTHER; note = 2'-fluorouridine
  modified_base 8: mod_base = um
  modified_base 9: mod_base = cm
  modified_base 10: mod_base = cm
  modified_base 11: mod_base = OTHER; note = 2'-O-methyladenosine
  modified_base 12: mod_base = um
  modified_base 13: mod_base = cm
  modified_base 14: mod_base = OTHER; note = 2'-fluorocytidine
  modified_base 15: mod_base = OTHER; note = 2'-O-methyladenosine
  modified_base 16: mod_base = OTHER; note = 2'-fluoroguanosine
  modified_base 17: mod_base = gm
  modified_base 18: mod_base = cm
  modified_base 19: mod_base = OTHER; note = 2'-O-methyladenosine
  modified_base 20: mod_base = gm
  modified_base 21: mod_base = OTHER; note = 2'-O-methyladenosine with a 3'-phosphorothioate linkage
  modified_base 22: mod_base = OTHER; note = 2'-O-methyluridine with a 3'-phosphorothioate linkage
  modified_base 23: mod_base = um
tctcagttccatccaggcagatt

SEQ ID NO: 270 - RNA, 23 nt, synthetic construct
  source 1..23: mol_type = other RNA
  modified_base 1: mod_base = OTHER; note = 2'-O-methyluridine with a 3'-phosphorothioate linkage
  modified_base 2: mod_base = OTHER; note = 2'-fluorouridine with a 3'-phosphorothioate linkage
  modified_base 3: mod_base = gm
  modified_base 4: mod_base = gm
  modified_base 5: mod_base = OTHER; note = 2'-fluorocytidine
  modified_base 6: mod_base = um
  modified_base 7: mod_base = OTHER; note = 2'-fluorocytidine
  modified_base 8: mod_base = um
  modified_base 9: mod_base = gm
  modified_base 10: mod_base = cm
  modified_base 11: mod_base = um
  modified_base 12: mod_base = um
  modified_base 13: mod_base = gm
  modified_base 14: mod_base = OTHER; note = 2'-fluorouridine
  modified_base 15: mod_base = cm
  modified_base 16: mod_base = OTHER; note = 2'-fluoroadenosine
  modified_base 17: mod_base = gm
  modified_base 18: mod_base = cm
  modified_base 19: mod_base = gm
  modified_base 20: mod_base = um
  modified_base 21: mod_base = OTHER; note = 2'-O-methylguanosine with a 3'-phosphorothioate linkage
  modified_base 22: mod_base = OTHER; note = 2'-O-methyladenosine with a 3'-phosphorothioate linkage
  modified_base 23: mod_base = gm
ttggctctgcttgtcagcgtgag

SEQ ID NO: 271 - RNA, 23 nt, synthetic construct
  source 1..23: mol_type = other RNA
  modified_base 1: mod_base = OTHER; note = 2'-O-methyluridine with a 3'-phosphorothioate linkage
  modified_base 2: mod_base = OTHER; note = 2'-fluorouridine with a 3'-phosphorothioate linkage
  modified_base 3: mod_base = cm
  modified_base 4: mod_base = cm
  modified_base 5: mod_base = OTHER; note = 2'-fluorouridine
  modified_base 6: mod_base = cm
  modified_base 7: mod_base = OTHER; note = 2'-fluoroadenosine
  modified_base 8: mod_base = gm
  modified_base 9: mod_base = um
  modified_base 10: mod_base = um
  modified_base 11: mod_base = cm
  modified_base 12: mod_base = cm
  modified_base 13: mod_base = OTHER; note = 2'-O-methyladenosine
  modified_base 14: mod_base = OTHER; note = 2'-fluorouridine
  modified_base 15: mod_base = cm
  modified_base 16: mod_base = OTHER; note = 2'-fluorocytidine
  modified_base 17: mod_base = OTHER; note = 2'-O-methyladenosine
  modified_base 18: mod_base = gm
  modified_base 19: mod_base = gm
  modified_base 20: mod_base = cm
  modified_base 21: mod_base = OTHER; note = 2'-O-methyladenosine with a 3'-phosphorothioate linkage
  modified_base 22: mod_base = OTHER; note = 2'-O-methylguanosine with a 3'-phosphorothioate linkage
  modified_base 23: mod_base = OTHER; note = 2'-O-methyladenosine
ttcctcagttccatccaggcaga

SEQ ID NO: 272 - RNA, 23 nt, synthetic construct
  source 1..23: mol_type = other RNA
  modified_base 1: mod_base = OTHER; note = 2'-O-methyluridine with a 3'-phosphorothioate linkage
  modified_base 2: mod_base = OTHER; note = 2'-fluoroguanosine with a 3'-phosphorothioate linkage
  modified_base 3: mod_base = OTHER; note = 2'-O-methyladenosine
  modified_base 4: mod_base = um
  modified_base 5: mod_base = OTHER; note = 2'-fluoroguanosine
  modified_base 6: mod_base = cm
  modified_base 7: mod_base = OTHER; note = 2'-fluorouridine
  modified_base 8: mod_base = gm
  modified_base 9: mod_base = cm
  modified_base 10: mod_base = um
  modified_base 11: mod_base = gm
  modified_base 12: mod_base = um
  modified_base 13: mod_base = gm
  modified_base 14: mod_base = OTHER; note = 2'-fluorocytidine
  modified_base 15: mod_base = cm
  modified_base 16: mod_base = OTHER; note = 2'-fluoroadenosine
  modified_base 17: mod_base = cm
  modified_base 18: mod_base = cm
  modified_base 19: mod_base = OTHER; note = 2'-O-methyladenosine
  modified_base 20: mod_base = um
  modified_base 21: mod_base = OTHER; note = 2'-O-methylcytidine with a 3'-phosphorothioate linkage
  modified_base 22: mod_base = OTHER; note = 2'-O-methyluridine with a 3'-phosphorothioate linkage
  modified_base 23: mod_base = cm
tgatgctgctgtgccaccatctc

SEQ ID NO: 273 - RNA, 23 nt, synthetic construct
  source 1..23: mol_type = other RNA
  modified_base 1: mod_base = OTHER; note = 2'-O-methyluridine with a 3'-phosphorothioate linkage
  modified_base 2: mod_base = OTHER; note = 2'-fluorouridine with a 3'-phosphorothioate linkage
  modified_base 3: mod_base = cm
  modified_base 4: mod_base = OTHER; note = 2'-O-methyladenosine
  modified_base 5: mod_base = OTHER; note = 2'-fluoroguanosine
  modified_base 6: mod_base = cm
  modified_base 7: mod_base = OTHER; note = 2'-fluoroguanosine
  modified_base 8: mod_base = um
  modified_base 9: mod_base = gm
  modified_base 10: mod_base = OTHER; note = 2'-O-methyladenosine
  modified_base 11: mod_base = gm
  modified_base 12: mod_base = cm
  modified_base 13: mod_base = cm
  modified_base 14: mod_base = OTHER; note = 2'-fluorouridine
  modified_base 15: mod_base = um
  modified_base 16: mod_base = OTHER; note = 2'-fluorouridine
  modified_base 17: mod_base = OTHER; note = 2'-O-methyladenosine
  modified_base 18: mod_base = OTHER; note = 2'-O-methyladenosine
  modified_base 19: mod_base = gm
  modified_base 20: mod_base = OTHER; note = 2'-O-methyladenosine
  modified_base 21: mod_base = OTHER; note = 2'-O-methylcytidine with a 3'-phosphorothioate linkage
  modified_base 22: mod_base = OTHER; note = 2'-O-methylcytidine with a 3'-phosphorothioate linkage
  modified_base 23: mod_base = um
ttcagcgtgagcctttaagacct

SEQ ID NO: 274 - RNA, 23 nt, synthetic construct
  source 1..23: mol_type = other RNA
  modified_base 1: mod_base = OTHER; note = 2'-O-methyluridine with a 3'-phosphorothioate linkage
  modified_base 2: mod_base = OTHER; note = 2'-fluorocytidine with a 3'-phosphorothioate linkage
  modified_base 3: mod_base = gm
  modified_base 4: mod_base = OTHER; note = 2'-O-methyladenosine
  modified_base 5: mod_base = OTHER; note = 2'-fluoroadenosine
  modified_base 6: mod_base = gm
  modified_base 7: mod_base = OTHER; note = 2'-fluorouridine
  modified_base 8: mod_base = um
  modified_base 9: mod_base = cm
  modified_base 10: mod_base = cm
  modified_base 11: mod_base = um
  modified_base 12: mod_base = gm
  modified_base 13: mod_base = gm
  modified_base 14: mod_base = OTHER; note = 2'-fluoroguanosine
  modified_base 15: mod_base = cm
  modified_base 16: mod_base = OTHER; note = 2'-fluorouridine
  modified_base 17: mod_base = gm
  modified_base 18: mod_base = cm
  modified_base 19: mod_base = OTHER; note = 2'-O-methyladenosine
  modified_base 20: mod_base = um
  modified_base 21: mod_base = OTHER; note = 2'-O-methylcytidine with a 3'-phosphorothioate linkage
  modified_base 22: mod_base = OTHER; note = 2'-O-methylcytidine with a 3'-phosphorothioate linkage
  modified_base 23: mod_base = cm
tcgaagttcctgggctgcatccc

SEQ ID NO: 275 - RNA, 23 nt, synthetic construct
  source 1..23: mol_type = other RNA
  modified_base 1: mod_base = OTHER; note = 2'-O-methyluridine with a 3'-phosphorothioate linkage
  modified_base 2: mod_base = OTHER; note = 2'-fluorocytidine with a 3'-phosphorothioate linkage
  modified_base 3: mod_base = um
  modified_base 4: mod_base = um
  modified_base 5: mod_base = OTHER; note = 2'-fluorouridine
  modified_base 6: mod_base = OTHER; note = 2'-O-methyladenosine
  modified_base 7: mod_base = OTHER; note = 2'-fluoroadenosine
  modified_base 8: mod_base = gm
  modified_base 9: mod_base = OTHER; note = 2'-O-methyladenosine
  modified_base 10: mod_base = cm
  modified_base 11: mod_base = cm
  modified_base 12: mod_base = um
  modified_base 13: mod_base = cm
  modified_base 14: mod_base = OTHER; note = 2'-fluoroadenosine
  modified_base 15: mod_base = OTHER; note = 2'-O-methyladenosine
  modified_base 16: mod_base = OTHER; note = 2'-fluoroadenosine
  modified_base 17: mod_base = um
  modified_base 18: mod_base = um
  modified_base 19: mod_base = cm
  modified_base 20: mod_base = um
  modified_base 21: mod_base = OTHER; note = 2'-O-methylcytidine with a 3'-phosphorothioate linkage
  modified_base 22: mod_base = OTHER; note = 2'-O-methylguanosine with a 3'-phosphorothioate linkage
  modified_base 23: mod_base = gm
tctttaagacctcaaattctcgg

SEQ ID NO: 276 - RNA, 23 nt, synthetic construct
  source 1..23: mol_type = other RNA
  modified_base 1: mod_base = OTHER; note = 2'-O-methyluridine with a 3'-phosphorothioate linkage
  modified_base 2: mod_base = OTHER; note = 2'-fluoroguanosine with a 3'-phosphorothioate linkage
  modified_base 3: mod_base = cm
  modified_base 4: mod_base = OTHER; note = 2'-O-methyladenosine
  modified_base 5: mod_base = OTHER; note = 2'-fluoroguanosine
  modified_base 6: mod_base = OTHER; note = 2'-O-methyladenosine
  modified_base 7: mod_base = OTHER; note = 2'-fluoroadenosine
  modified_base 8: mod_base = um
  modified_base 9: mod_base = OTHER; note = 2'-O-methyladenosine
  modified_base 10: mod_base = um
  modified_base 11: mod_base = cm
  modified_base 12: mod_base = cm
  modified_base 13: mod_base = um
  modified_base 14: mod_base = OTHER; note = 2'-fluorocytidine
  modified_base 15: mod_base = cm
  modified_base 16: mod_base = OTHER; note = 2'-fluorouridine
  modified_base 17: mod_base = cm
  modified_base 18: mod_base = cm
  modified_base 19: mod_base = OTHER; note = 2'-O-methyladenosine
  modified_base 20: mod_base = um
  modified_base 21: mod_base = OTHER; note = 2'-O-methylcytidine with a 3'-phosphorothioate linkage
  modified_base 22: mod_base = OTHER; note = 2'-O-methyluridine with a 3'-phosphorothioate linkage
  modified_base 23: mod_base = gm
tgcagaatatcctcctccatctg

SEQ ID NO: 277 - RNA, 23 nt, synthetic construct
  source 1..23: mol_type = other RNA
  modified_base 1: mod_base = OTHER; note = 2'-O-methyluridine with a 3'-phosphorothioate linkage
  modified_base 2: mod_base = OTHER; note = 2'-fluoroguanosine with a 3'-phosphorothioate linkage
  modified_base 3: mod_base = cm
  modified_base 4: mod_base = um
  modified_base 5: mod_base = OTHER; note = 2'-fluoroguanosine
  modified_base 6: mod_base = um
  modified_base 7: mod_base = OTHER; note = 2'-fluorouridine
  modified_base 8: mod_base = cm
  modified_base 9: mod_base = cm
  modified_base 10: mod_base = um
  modified_base 11: mod_base = gm
  modified_base 12: mod_base = gm
  modified_base 13: mod_base = cm
  modified_base 14: mod_base = OTHER; note = 2'-fluorocytidine
  modified_base 15: mod_base = um
  modified_base 16: mod_base = OTHER; note = 2'-fluorouridine
  modified_base 17: mod_base = um
  modified_base 18: mod_base = gm
  modified_base 19: mod_base = um
  modified_base 20: mod_base = cm
  modified_base 21: mod_base = OTHER; note = 2'-O-methyladenosine with a 3'-phosphorothioate linkage
  modified_base 22: mod_base = OTHER; note = 2'-O-methylguanosine with a 3'-phosphorothioate linkage
  modified_base 23: mod_base = cm
tgctgttcctggcctttgtcagc

SEQ ID NO: 278 - RNA, 23 nt, synthetic construct
  source 1..23: mol_type = other RNA
  modified_base 1: mod_base = OTHER; note = 2'-O-methyluridine with a 3'-phosphorothioate linkage
  modified_base 2: mod_base = OTHER; note = 2'-fluoroguanosine with a 3'-phosphorothioate linkage
  modified_base 3: mod_base = cm
  modified_base 4: mod_base = um
  modified_base 5: mod_base = OTHER; note = 2'-fluorocytidine
  modified_base 6: mod_base = um
  modified_base 7: mod_base = OTHER; note = 2'-fluoroguanosine
  modified_base 8: mod_base = cm
  modified_base 9: mod_base = um
  modified_base 10: mod_base = um
  modified_base 11: mod_base = gm
  modified_base 12: mod_base = um
  modified_base 13: mod_base = cm
  modified_base 14: mod_base = OTHER; note = 2'-fluoroadenosine
  modified_base 15: mod_base = gm
  modified_base 16: mod_base = OTHER; note = 2'-fluorocytidine
  modified_base 17: mod_base = gm
  modified_base 18: mod_base = um
  modified_base 19: mod_base = gm
  modified_base 20: mod_base = OTHER; note = 2'-O-methyladenosine
  modified_base 21: mod_base = OTHER; note = 2'-O-methylguanosine with a 3'-phosphorothioate linkage
  modified_base 22: mod_base = OTHER; note = 2'-O-methylcytidine with a 3'-phosphorothioate linkage
  modified_base 23: mod_base = cm
tgctctgcttgtcagcgtgagcc

SEQ ID NO: 279 - RNA, 23 nt, synthetic construct
  source 1..23: mol_type = other RNA
  modified_base 1: mod_base = OTHER; note = 2'-O-methyluridine with a 3'-phosphorothioate linkage
  modified_base 2: mod_base = OTHER; note = 2'-fluorocytidine with a 3'-phosphorothioate linkage
  modified_base 3: mod_base = cm
  modified_base 4: mod_base = OTHER; note = 2'-O-methyladenosine
  modified_base 5: mod_base = OTHER; note = 2'-fluorouridine
  modified_base 6: mod_base = cm
  modified_base 7: mod_base = OTHER; note = 2'-fluorocytidine
  modified_base 8: mod_base = OTHER; note = 2'-O-methyladenosine
  modified_base 9: mod_base = gm
  modified_base 10: mod_base = gm
  modified_base 11: mod_base = cm
  modified_base 12: mod_base = OTHER; note = 2'-O-methyladenosine
  modified_base 13: mod_base = gm
  modified_base 14: mod_base = OTHER; note = 2'-fluoroadenosine
  modified_base 15: mod_base = um
  modified_base 16: mod_base = OTHER; note = 2'-fluorouridine
  modified_base 17: mod_base = cm
  modified_base 18: mod_base = OTHER; note = 2'-O-methyladenosine
  modified_base 19: mod_base = gm
  modified_base 20: mod_base = gm
  modified_base 21: mod_base = OTHER; note = 2'-O-methylcytidine with a 3'-phosphorothioate linkage
  modified_base 22: mod_base = OTHER; note = 2'-O-methyluridine with a 3'-phosphorothioate linkage
  modified_base 23: mod_base = gm
tccatccaggcagattcaggctg

SEQ ID NO: 280 - RNA, 23 nt, synthetic construct
  source 1..23: mol_type = other RNA
  modified_base 1: mod_base = OTHER; note = 2'-O-methyluridine with a 3'-phosphorothioate linkage
  modified_base 2: mod_base = OTHER; note = 2'-fluoroguanosine with a 3'-phosphorothioate linkage
  modified_base 3: mod_base = cm
  modified_base 4: mod_base = cm
  modified_base 5: mod_base = OTHER; note = 2'-fluoroadenosine
  modified_base 6: mod_base = um
  modified_base 7: mod_base = OTHER; note = 2'-fluoroadenosine
  modified_base 8: mod_base = gm
  modified_base 9: mod_base = OTHER; note = 2'-O-methyladenosine
  modified_base 10: mod_base = gm
  modified_base 11: mod_base = OTHER; note = 2'-O-methyladenosine
  modified_base 12: mod_base = cm
  modified_base 13: mod_base = cm
  modified_base 14: mod_base = OTHER; note = 2'-fluorocytidine
  modified_base 15: mod_base = OTHER; note = 2'-O-methyladenosine
  modified_base 16: mod_base = OTHER; note = 2'-fluoroguanosine
  modified_base 17: mod_base = gm
  modified_base 18: mod_base = cm
  modified_base 19: mod_base = um
  modified_base 20: mod_base = gm
  modified_base 21: mod_base = OTHER; note = 2'-O-methyluridine with a 3'-phosphorothioate linkage
  modified_base 22: mod_base = OTHER; note = 2'-O-methyluridine with a 3'-phosphorothioate linkage
  modified_base 23: mod_base = cm
tgccatagagacccaggctgttc

SEQ ID NO: 281 - RNA, 23 nt, synthetic construct
  source 1..23: mol_type = other RNA
  modified_base 1: mod_base = OTHER; note = 2'-O-methyluridine with a 3'-phosphorothioate linkage
  modified_base 2: mod_base = OTHER; note = 2'-fluoroadenosine with a 3'-phosphorothioate linkage
  modified_base 3: mod_base = gm
  modified_base 4: mod_base = gm
  modified_base 5: mod_base = OTHER; note = 2'-fluorocytidine
  modified_base 6: mod_base = um
  modified_base 7: mod_base = OTHER; note = 2'-fluorouridine
  modified_base 8: mod_base = gm
  modified_base 9: mod_base = cm
  modified_base 10: mod_base = cm
  modified_base 11: mod_base = cm
  modified_base 12: mod_base = gm
  modified_base 13: mod_base = OTHER; note = 2'-O-methyladenosine
  modified_base 14: mod_base = OTHER; note = 2'-fluoroadenosine
  modified_base 15: mod_base = gm
  modified_base 16: mod_base = OTHER; note = 2'-fluorouridine
  modified_base 17: mod_base = um
  modified_base 18: mod_base = cm
  modified_base 19: mod_base = cm
  modified_base 20: mod_base = um
  modified_base 21: mod_base = OTHER; note = 2'-O-methylguanosine with a 3'-phosphorothioate linkage
  modified_base 22: mod_base = OTHER; note = 2'-O-methylguanosine with a 3'-phosphorothioate linkage
  modified_base 23: mod_base = gm
taggcttgcccgaagttcctggg

SEQ ID NO: 282 - RNA, 23 nt, synthetic construct
  source 1..23: mol_type = other RNA
  modified_base 1: mod_base = OTHER; note = 2'-O-methyluridine with a 3'-phosphorothioate linkage
  modified_base 2: mod_base = OTHER; note = 2'-fluoroguanosine with a 3'-phosphorothioate linkage
  modified_base 3: mod_base = gm
  modified_base 4: mod_base = cm
  modified_base 5: mod_base = OTHER; note = 2'-fluoroguanosine
  modified_base 6: mod_base = um
  modified_base 7: mod_base = OTHER; note = 2'-fluoroguanosine
  modified_base 8: mod_base = gm
  modified_base 9: mod_base = OTHER; note = 2'-O-methyladenosine
  modified_base 10: mod_base = OTHER; note = 2'-O-methyladenosine
  modified_base 11: mod_base = gm
  modified_base 12: mod_base = um
  modified_base 13: mod_base = gm
  modified_base 14: mod_base = OTHER; note = 2'-fluorouridine
  modified_base 15: mod_base = um
  modified_base 16: mod_base = OTHER; note = 2'-fluorocytidine
  modified_base 17: mod_base = cm
  modified_base 18: mod_base = um
  modified_base 19: mod_base = um
  modified_base 20: mod_base = gm
  modified_base 21: mod_base = OTHER; note = 2'-O-methylcytidine with a 3'-phosphorothioate linkage
  modified_base 22: mod_base = OTHER; note = 2'-O-methyladenosine with a 3'-phosphorothioate linkage
  modified_base 23: mod_base = gm
tggcgtggaagtgttccttgcag

SEQ ID NO: 283 - RNA, 23 nt, synthetic construct
  source 1..23: mol_type = other RNA
  modified_base 1: mod_base = OTHER; note = 2'-O-methyluridine with a 3'-phosphorothioate linkage
  modified_base 2: mod_base = OTHER; note = 2'-fluorouridine with a 3'-phosphorothioate linkage
  modified_base 3: mod_base = gm
  modified_base 4: mod_base = OTHER; note = 2'-O-methyladenosine
  modified_base 5: mod_base = OTHER; note = 2'-fluoroguanosine
  modified_base 6: mod_base = cm
  modified_base 7: mod_base = OTHER; note = 2'-fluorocytidine
  modified_base 8: mod_base = um
  modified_base 9: mod_base = um
  modified_base 10: mod_base = um
  modified_base 11: mod_base = OTHER; note = 2'-O-methyladenosine
  modified_base 12: mod_base = OTHER; note = 2'-O-methyladenosine
  modified_base 13: mod_base = gm
  modified_base 14: mod_base = OTHER; note = 2'-fluoroadenosine
  modified_base 15: mod_base = cm
  modified_base 16: mod_base = OTHER; note = 2'-fluorocytidine
  modified_base 17: mod_base = um
  modified_base 18: mod_base = cm
  modified_base 19: mod_base = OTHER; note = 2'-O-methyladenosine
  modified_base 20: mod_base = OTHER; note = 2'-O-methyladenosine
  modified_base 21: mod_base = OTHER; note = 2'-O-methyladenosine with a 3'-phosphorothioate linkage
  modified_base 22: mod_base = OTHER; note = 2'-O-methyluridine with a 3'-phosphorothioate linkage
  modified_base 23: mod_base = um
ttgagcctttaagacctcaaatt

SEQ ID NO: 284 - RNA, 23 nt, synthetic construct
  source 1..23: mol_type = other RNA
  modified_base 1: mod_base = OTHER; note = 2'-O-methyluridine with a 3'-phosphorothioate linkage
  modified_base 2: mod_base = OTHER; note = 2'-fluoroguanosine with a 3'-phosphorothioate linkage
  modified_base 3: mod_base = cm
  modified_base 4: mod_base = OTHER; note = 2'-O-methyladenosine
  modified_base 5: mod_base = OTHER; note = 2'-fluorocytidine
  modified_base 6: mod_base = cm
  modified_base 7: mod_base = OTHER; note = 2'-fluorouridine
  modified_base 8: mod_base = um
  modified_base 9: mod_base = cm
  modified_base 10: mod_base = um
  modified_base 11: mod_base = gm
  modified_base 12: mod_base = um
  modified_base 13: mod_base = gm
  modified_base 14: mod_base = OTHER; note = 2'-fluorocytidine
  modified_base 15: mod_base = cm
  modified_base 16: mod_base = OTHER; note = 2'-fluorouridine
  modified_base 17: mod_base = gm
  modified_base 18: mod_base = gm
  modified_base 19: mod_base = gm
  modified_base 20: mod_base = cm
  modified_base 21: mod_base = OTHER; note = 2'-O-methylcytidine with a 3'-phosphorothioate linkage
  modified_base 22: mod_base = OTHER; note = 2'-O-methyladenosine with a 3'-phosphorothioate linkage
  modified_base 23: mod_base = cm
tgcaccttctgtgcctgggccac

SEQ ID NO: 285 - RNA, 23 nt, synthetic construct
  source 1..23: mol_type = other RNA
  modified_base 1: mod_base = OTHER; note = 2'-O-methyluridine with a 3'-phosphorothioate linkage
  modified_base 2: mod_base = OTHER; note = 2'-fluoroguanosine with a 3'-phosphorothioate linkage
  modified_base 3: mod_base = OTHER; note = 2'-O-methyladenosine
  modified_base 4: mod_base = OTHER; note = 2'-O-methyladenosine
  modified_base 5: mod_base = OTHER; note = 2'-fluorouridine
  modified_base 6: mod_base = OTHER; note = 2'-O-methyladenosine
  modified_base 7: mod_base = OTHER; note = 2'-fluorouridine
  modified_base 8: mod_base = cm
  modified_base 9: mod_base = cm
  modified_base 10: mod_base = um
  modified_base 11: mod_base = cm
  modified_base 12: mod_base = cm
  modified_base 13: mod_base = um
  modified_base 14: mod_base = OTHER; note = 2'-fluorocytidine
  modified_base 15: mod_base = cm
  modified_base 16: mod_base = OTHER; note = 2'-fluoroadenosine
  modified_base 17: mod_base = um
  modified_base 18: mod_base = cm
  modified_base 19: mod_base = um
  modified_base 20: mod_base = gm
  modified_base 21: mod_base = OTHER; note = 2'-O-methyladenosine with a 3'-phosphorothioate linkage
  modified_base 22: mod_base = OTHER; note = 2'-O-methylguanosine with a 3'-phosphorothioate linkage
  modified_base 23: mod_base = um
tgaatatcctcctccatctgagt

SEQ ID NO: 286 - RNA, 23 nt, synthetic construct
  source 1..23: mol_type = other RNA
  modified_base 1: mod_base = OTHER; note = 2'-O-methyluridine with a 3'-phosphorothioate linkage
  modified_base 2: mod_base = OTHER; note = 2'-fluoroguanosine with a 3'-phosphorothioate linkage
  modified_base 3: mod_base = gm
  modified_base 4: mod_base = cm
  modified_base 5: mod_base = OTHER; note = 2'-fluorouridine
  modified_base 6: mod_base = um
  modified_base 7: mod_base = OTHER; note = 2'-fluoroguanosine
  modified_base 8: mod_base = cm
  modified_base 9: mod_base = cm
  modified_base 10: mod_base = cm
  modified_base 11: mod_base = gm
  modified_base 12: mod_base = OTHER; note = 2'-O-methyladenosine
  modified_base 13: mod_base = OTHER; note = 2'-O-methyladenosine
  modified_base 14: mod_base = OTHER; note = 2'-fluoroguanosine
  modified_base 15: mod_base = um
  modified_base 16: mod_base = OTHER; note = 2'-fluorouridine
  modified_base 17: mod_base = cm
  modified_base 18: mod_base = cm
  modified_base 19: mod_base = um
  modified_base 20: mod_base = gm
  modified_base 21: mod_base = OTHER; note = 2'-O-methylguanosine with a 3'-phosphorothioate linkage
  modified_base 22: mod_base = OTHER; note = 2'-O-methylguanosine with a 3'-phosphorothioate linkage
  modified_base 23: mod_base = cm
tggcttgcccgaagttcctgggc

SEQ ID NO: 287 - RNA, 23 nt, synthetic construct
  source 1..23: mol_type = other RNA
  modified_base 1: mod_base = OTHER; note = 2'-O-methyluridine with a 3'-phosphorothioate linkage
  modified_base 2: mod_base = OTHER; note = 2'-fluorouridine with a 3'-phosphorothioate linkage
  modified_base 3: mod_base = gm
  modified_base 4: mod_base = cm
  modified_base 5: mod_base = OTHER; note = 2'-fluorocytidine
  modified_base 6: mod_base = cm
  modified_base 7: mod_base = OTHER; note = 2'-fluoroguanosine
  modified_base 8: mod_base = OTHER; note = 2'-O-methyladenosine
  modified_base 9: mod_base = OTHER; note = 2'-O-methyladenosine
  modified_base 10: mod_base = gm
  modified_base 11: mod_base = um
  modified_base 12: mod_base = um
  modified_base 13: mod_base = cm
  modified_base 14: mod_base = OTHER; note = 2'-fluorocytidine
  modified_base 15: mod_base = um
  modified_base 16: mod_base = OTHER; note = 2'-fluoroguanosine
  modified_base 17: mod_base = gm
  modified_base 18: mod_base = gm
  modified_base 19: mod_base = cm
  modified_base 20: mod_base = um
  modified_base 21: mod_base = OTHER; note = 2'-O-methylguanosine with a 3'-phosphorothioate linkage
  modified_base 22: mod_base = OTHER; note = 2'-O-methylcytidine with a 3'-phosphorothioate linkage
  modified_base 23: mod_base = OTHER; note = 2'-O-methyladenosine
ttgcccgaagttcctgggctgca

SEQ ID NO: 288 - RNA, 23 nt, synthetic construct
  source 1..23: mol_type = other RNA
  modified_base 1: mod_base = OTHER; note = 2'-O-methyluridine with a 3'-phosphorothioate linkage
  modified_base 2: mod_base = OTHER; note = 2'-fluorocytidine with a 3'-phosphorothioate linkage
  modified_base 3: mod_base = cm
  modified_base 4: mod_base = OTHER; note = 2'-O-methyladenosine
  modified_base 5: mod_base = OTHER; note = 2'-fluoroguanosine
  modified_base 6: mod_base = gm
  modified_base 7: mod_base = OTHER; note = 2'-fluorocytidine
  modified_base 8: mod_base = OTHER; note = 2'-O-methyladenosine
  modified_base 9: mod_base = gm
  modified_base 10: mod_base = OTHER; note = 2'-O-methyladenosine
  modified_base 11: mod_base = um
  modified_base 12: mod_base = um
  modified_base 13: mod_base = cm
  modified_base 14: mod_base = OTHER; note = 2'-fluoroadenosine
  modified_base 15: mod_base = gm
  modified_base 16: mod_base = OTHER; note = 2'-fluoroguanosine
  modified_base 17: mod_base = cm
  modified_base 18: mod_base = um
  modified_base 19: mod_base = gm
  modified_base 20: mod_base = gm
  modified_base 21: mod_base = OTHER; note = 2'-O-methylguanosine with a 3'-phosphorothioate linkage
  modified_base 22: mod_base = OTHER; note = 2'-O-methyladenosine with a 3'-phosphorothioate linkage
  modified_base 23: mod_base = gm
tccaggcagattcaggctgggag

SEQ ID NO: 289 - RNA, 23 nt, synthetic construct
  source 1..23: mol_type = other RNA
  modified_base 1: mod_base = OTHER; note = 2'-O-methyluridine with a 3'-phosphorothioate linkage
  modified_base 2: mod_base = OTHER; note = 2'-fluoroguanosine with a 3'-phosphorothioate linkage
  modified_base 3: mod_base = cm
  modified_base 4: mod_base = um
  modified_base 5: mod_base = OTHER; note = 2'-fluorouridine
  modified_base 6: mod_base = gm
  modified_base 7: mod_base = OTHER; note = 2'-fluorocytidine
  modified_base 8: mod_base = cm
  modified_base 9: mod_base = cm
  modified_base 10: mod_base = gm
  modified_base 11: mod_base = OTHER; note = 2'-O-methyladenosine
  modified_base 12: mod_base = OTHER; note = 2'-O-methyladenosine
  modified_base 13: mod_base = gm
  modified_base 14: mod_base = OTHER; note = 2'-fluorouridine
  modified_base 15: mod_base = um
  modified_base 16: mod_base = OTHER; note = 2'-fluorocytidine
  modified_base 17: mod_base = cm
  modified_base 18: mod_base = um
  modified_base 19: mod_base = gm
  modified_base 20: mod_base = gm
  modified_base 21: mod_base = OTHER; note = 2'-O-methylguanosine with a 3'-phosphorothioate linkage
  modified_base 22: mod_base = OTHER; note = 2'-O-methylcytidine with a 3'-phosphorothioate linkage
  modified_base 23: mod_base = um
tgcttgcccgaagttcctgggct

SEQ ID NO: 290 - RNA, 23 nt, synthetic construct
  source 1..23: mol_type = other RNA
  modified_base 1: mod_base = OTHER; note = 2'-O-methyluridine with a 3'-phosphorothioate linkage
  modified_base 2: mod_base = OTHER; note = 2'-fluorouridine with a 3'-phosphorothioate linkage
  modified_base 3: mod_base = gm
  modified_base 4: mod_base = gm
  modified_base 5: mod_base = OTHER; note = 2'-fluoroadenosine
  modified_base 6: mod_base = um
  modified_base 7: mod_base = OTHER; note = 2'-fluorocytidine
  modified_base 8: mod_base = um
  modified_base 9: mod_base = gm
  modified_base 10: mod_base = um
  modified_base 11: mod_base = cm
  modified_base 12: mod_base = gm
  modified_base 13: mod_base = cm
  modified_base 14: mod_base = OTHER; note = 2'-fluoroadenosine
  modified_base 15: mod_base = gm
  modified_base 16: mod_base = OTHER; note = 2'-fluorocytidine
  modified_base 17: mod_base = cm
  modified_base 18: mod_base = gm
  modified_base 19: mod_base = OTHER; note = 2'-O-methyladenosine
  modified_base 20: mod_base = um
  modified_base 21: mod_base = OTHER; note = 2'-O-methylguanosine with a 3'-phosphorothioate linkage
  modified_base 22: mod_base = OTHER; note = 2'-O-methylcytidine with a 3'-phosphorothioate linkage
  modified_base 23: mod_base = um
ttggatctgtcgcagccgatgct

SEQ ID NO: 291 - RNA, 23 nt, synthetic construct
  source 1..23: mol_type = other RNA
  modified_base 1: mod_base = OTHER; note = 2'-O-methyluridine with a 3'-phosphorothioate linkage
  modified_base 2: mod_base = OTHER; note = 2'-fluoroadenosine with a 3'-phosphorothioate linkage
  modified_base 3: mod_base = gm
  modified_base 4: mod_base = cm
  modified_base 5: mod_base = OTHER; note = 2'-fluorocytidine
  modified_base 6: mod_base = gm
  modified_base 7: mod_base = OTHER; note = 2'-fluoroadenosine
  modified_base 8: mod_base = um
  modified_base 9: mod_base = gm
  modified_base 10: mod_base = cm
  modified_base 11: mod_base = um
  modified_base 12: mod_base = gm
  modified_base 13: mod_base = cm
  modified_base 14: mod_base = OTHER; note = 2'-fluorouridine
  modified_base 15: mod_base = gm
  modified_base 16: mod_base = OTHER; note = 2'-fluorouridine
  modified_base 17: mod_base = gm
  modified_base 18: mod_base = cm
  modified_base 19: mod_base = cm
  modified_base 20: mod_base = OTHER; note = 2'-O-methyladenosine
  modified_base 21: mod_base = OTHER; note = 2'-O-methylcytidine with a 3'-phosphorothioate linkage
  modified_base 22: mod_base = OTHER; note = 2'-O-methylcytidine with a 3'-phosphorothioate linkage
  modified_base 23: mod_base = OTHER; note = 2'-O-methyladenosine
tagccgatgctgctgtgccacca

SEQ ID NO: 292 - RNA, 23 nt, synthetic construct
  source 1..23: mol_type = other RNA
  modified_base 1: mod_base = OTHER; note = 2'-O-methyluridine with a 3'-phosphorothioate linkage
  modified_base 2: mod_base = OTHER; note = 2'-fluoroguanosine with a 3'-phosphorothioate linkage
  modified_base 3: mod_base = cm
  modified_base 4: mod_base = OTHER; note = 2'-O-methyladenosine
  modified_base 5: mod_base = OTHER; note = 2'-fluorocytidine
  modified_base 6: mod_base = gm
  modified_base 7: mod_base = OTHER; note = 2'-fluorouridine
  modified_base 8: mod_base = gm
  modified_base 9: mod_base = gm
  modified_base 10: mod_base = cm
  modified_base 11: mod_base = cm
  modified_base 12: mod_base = um
  modified_base 13: mod_base = gm
  modified_base 14: mod_base = OTHER; note = 2'-fluorouridine
  modified_base 15: mod_base = gm
  modified_base 16: mod_base = OTHER; note = 2'-fluoroadenosine
  modified_base 17: mod_base = gm
  modified_base 18: mod_base = gm
  modified_base 19: mod_base = gm
  modified_base 20: mod_base = cm
  modified_base 21: mod_base = OTHER; note = 2'-O-methylcytidine with a 3'-phosphorothioate linkage
  modified_base 22: mod_base = OTHER; note = 2'-O-methylcytidine with a 3'-phosphorothioate linkage
  modified_base 23: mod_base = OTHER; note = 2'-O-methyladenosine
tgcacgtggcctgtgagggccca

SEQ ID NO: 293 - RNA, 23 nt, synthetic construct
  source 1..23: mol_type = other RNA
  modified_base 1: mod_base = OTHER; note = 2'-O-methyluridine with a 3'-phosphorothioate linkage
  modified_base 2: mod_base = OTHER; note = 2'-fluorocytidine with a 3'-phosphorothioate linkage
  modified_base 3: mod_base = OTHER; note = 2'-O-methyladenosine
  modified_base 4: mod_base = OTHER; note = 2'-O-methyladenosine
  modified_base 5: mod_base = OTHER; note = 2'-fluorocytidine
  modified_base 6: mod_base = OTHER; note = 2'-O-methyladenosine
  modified_base 7: mod_base = OTHER; note = 2'-fluoroguanosine
  modified_base 8: mod_base = gm
  modified_base 9: mod_base = cm
  modified_base 10: mod_base = um
  modified_base 11: mod_base = um
  modified_base 12: mod_base = gm
  modified_base 13: mod_base = cm
  modified_base 14: mod_base = OTHER; note = 2'-fluorocytidine
  modified_base 15: mod_base = cm
  modified_base 16: mod_base = OTHER; note = 2'-fluoroguanosine
  modified_base 17: mod_base = OTHER; note = 2'-O-methyladenosine
  modified_base 18: mod_base = OTHER; note = 2'-O-methyladenosine
  modified_base 19: mod_base = gm
  modified_base 20: mod_base = um
  modified_base 21: mod_base = OTHER; note = 2'-O-methyluridine with a 3'-phosphorothioate linkage
  modified_base 22: mod_base = OTHER; note = 2'-O-methylcytidine with a 3'-phosphorothioate linkage
  modified_base 23: mod_base = cm
tcaacaggcttgcccgaagttcc

SEQ ID NO: 294 - RNA, 23 nt, synthetic construct
  source 1..23: mol_type = other RNA
  modified_base 1: mod_base = OTHER; note = 2'-O-methyluridine with a 3'-phosphorothioate linkage
  modified_base 2: mod_base = OTHER; note = 2'-fluorocytidine with a 3'-phosphorothioate linkage
  modified_base 3: mod_base = um
  modified_base 4: mod_base = um
  modified_base 5: mod_base = OTHER; note = 2'-fluoroguanosine
  modified_base 6: mod_base = um
  modified_base 7: mod_base = OTHER; note = 2'-fluorocytidine
  modified_base 8: mod_base = OTHER; note = 2'-O-methyladenosine
  modified_base 9: mod_base = gm
  modified_base 10: mod_base = cm
  modified_base 11: mod_base = gm
  modified_base 12: mod_base = um
  modified_base 13: mod_base = gm
  modified_base 14: mod_base = OTHER; note = 2'-fluoroadenosine
  modified_base 15: mod_base = gm
  modified_base 16: mod_base = OTHER; note = 2'-fluorocytidine
  modified_base 17: mod_base = cm
  modified_base 18: mod_base = um
  modified_base 19: mod_base = um
  modified_base 20: mod_base = um
  modified_base 21: mod_base = OTHER; note = 2'-O-methyladenosine with a 3'-phosphorothioate linkage
  modified_base 22: mod_base = OTHER; note = 2'-O-methyladenosine with a 3'-phosphorothioate linkage
  modified_base 23: mod_base = gm
tcttgtcagcgtgagcctttaag

SEQ ID NO: 295 - RNA, 23 nt, synthetic construct
  source 1..23: mol_type = other RNA
  modified_base 1: mod_base = OTHER; note = 2'-O-methyluridine with a 3'-phosphorothioate linkage
  modified_base 2: mod_base = OTHER; note = 2'-fluorocytidine with a 3'-phosphorothioate linkage
  modified_base 3: mod_base = um
  modified_base 4: mod_base = cm
  modified_base 5: mod_base = OTHER; note = 2'-fluorocytidine
  modified_base 6: mod_base = OTHER; note = 2'-O-methyladenosine
  modified_base 7: mod_base = OTHER; note = 2'-fluoroadenosine
  modified_base 8: mod_base = cm
  modified_base 9: mod_base = OTHER; note = 2'-O-methyladenosine
  modified_base 10: mod_base = gm
  modified_base 11: mod_base = gm
  modified_base 12: mod_base = cm
  modified_base 13: mod_base = um
  modified_base 14: mod_base = OTHER; note = 2'-fluorouridine
  modified_base 15: mod_base = gm
  modified_base 16: mod_base = OTHER; note = 2'-fluorocytidine
  modified_base 17: mod_base = cm
  modified_base 18: mod_base = cm
  modified_base 19: mod_base = gm
  modified_base 20: mod_base = OTHER; note = 2'-O-methyladenosine
  modified_base 21: mod_base = OTHER; note = 2'-O-methyladenosine with a 3'-phosphorothioate linkage
  modified_base 22: mod_base = OTHER; note = 2'-O-methylguanosine with a 3'-phosphorothioate linkage
  modified_base 23: mod_base = um
tctccaacaggcttgcccgaagt

SEQ ID NO: 296 - RNA, 23 nt, synthetic construct
  source 1..23: mol_type = other RNA
  modified_base 1: mod_base = OTHER; note = 2'-O-methyluridine with a 3'-phosphorothioate linkage
  modified_base 2: mod_base = OTHER; note = 2'-fluoroguanosine with a 3'-phosphorothioate linkage
  modified_base 3: mod_base = OTHER; note = 2'-O-methyladenosine
  modified_base 4: mod_base = um
  modified_base 5: mod_base = OTHER; note = 2'-fluorocytidine
  modified_base 6: mod_base = um
  modified_base 7: mod_base = OTHER; note = 2'-fluoroguanosine
  modified_base 8: mod_base = um
  modified_base 9: mod_base = cm
  modified_base 10: mod_base = gm
  modified_base 11: mod_base = cm
  modified_base 12: mod_base = OTHER; note = 2'-O-methyladenosine
  modified_base 13: mod_base = gm
  modified_base 14: mod_base = OTHER; note = 2'-fluorocytidine
  modified_base 15: mod_base = cm
  modified_base 16: mod_base = OTHER; note = 2'-fluoroguanosine
  modified_base 17: mod_base = OTHER; note = 2'-O-methyladenosine
  modified_base 18: mod_base = um
  modified_base 19: mod_base = gm
  modified_base 20: mod_base = cm
  modified_base 21: mod_base = OTHER; note = 2'-O-methyluridine with a 3'-phosphorothioate linkage
  modified_base 22: mod_base = OTHER; note = 2'-O-methylguanosine with a 3'-phosphorothioate linkage
  modified_base 23: mod_base = cm
tgatctgtcgcagccgatgctgc

SEQ ID NO: 297 - RNA, 23 nt, synthetic construct
  source 1..23: mol_type = other RNA
  modified_base 1: mod_base = OTHER; note = 2'-O-methyluridine with a 3'-phosphorothioate linkage
  modified_base 2: mod_base = OTHER; note = 2'-fluorouridine with a 3'-phosphorothioate linkage
  modified_base 3: mod_base = cm
  modified_base 4: mod_base = OTHER; note = 2'-O-methyladenosine
  modified_base 5: mod_base = OTHER; note = 2'-fluoroguanosine
  modified_base 6: mod_base = um
  modified_base 7: mod_base = OTHER; note = 2'-fluorouridine
  modified_base 8: mod_base = cm
  modified_base 9: mod_base = cm
  modified_base 10: mod_base = OTHER; note = 2'-O-methyladenosine
  modified_base 11: mod_base = um
  modified_base 12: mod_base = cm
  modified_base 13: mod_base = cm
  modified_base 14: mod_base = OTHER; note = 2'-fluoroadenosine
  modified_base 15: mod_base = gm
  modified_base 16: mod_base = OTHER; note = 2'-fluoroguanosine
  modified_base 17: mod_base = cm
  modified_base 18: mod_base = OTHER; note = 2'-O-methyladenosine
  modified_base 19: mod_base = gm
  modified_base 20: mod_base = OTHER; note = 2'-O-methyladenosine
  modified_base 21: mod_base = OTHER; note = 2'-O-methyluridine with a 3'-phosphorothioate linkage
  modified_base 22: mod_base = OTHER; note = 2'-O-methyluridine with a 3'-phosphorothioate linkage
  modified_base 23: mod_base = cm
ttcagttccatccaggcagattc

SEQ ID NO: 298 - RNA, 23 nt, synthetic construct
  source 1..23: mol_type = other RNA
  modified_base 1: mod_base = OTHER; note = 2'-O-methyluridine with a 3'-phosphorothioate linkage
  modified_base 2: mod_base = OTHER; note = 2'-fluorocytidine with a 3'-phosphorothioate linkage
  modified_base 3: mod_base = um
  modified_base 4: mod_base = cm
  modified_base 5: mod_base = OTHER; note = 2'-fluorouridine
  modified_base 6: mod_base = gm
  modified_base 7: mod_base = OTHER; note = 2'-fluorocytidine
  modified_base 8: mod_base = um
  modified_base 9: mod_base = um
  modified_base 10: mod_base = gm
  modified_base 11: mod_base = um
  modified_base 12: mod_base = cm
  modified_base 13: mod_base = OTHER; note = 2'-O-methyladenosine
  modified_base 14: mod_base = OTHER; note = 2'-fluoroguanosine
  modified_base 15: mod_base = cm
  modified_base 16: mod_base = OTHER; note = 2'-fluoroguanosine
  modified_base 17: mod_base = um
  modified_base 18: mod_base = gm
  modified_base 19: mod_base = OTHER; note = 2'-O-methyladenosine
  modified_base 20: mod_base = gm
  modified_base 21: mod_base = OTHER; note = 2'-O-methylcytidine with a 3'-phosphorothioate linkage
  modified_base 22: mod_base = OTHER; note = 2'-O-methylcytidine with a 3'-phosphorothioate linkage
  modified_base 23: mod_base = um
tctctgcttgtcagcgtgagcct

SEQ ID NO: 299 - RNA, 23 nt, synthetic construct
  source 1..23: mol_type = other RNA
  modified_base 1: mod_base = OTHER; note = 2'-O-methyluridine with a 3'-phosphorothioate linkage
  modified_base 2: mod_base = OTHER; note = 2'-fluorocytidine with a 3'-phosphorothioate linkage
  modified_base 3: mod_base = OTHER; note = 2'-O-methyladenosine
  modified_base 4: mod_base = gm
  modified_base 5: mod_base = OTHER; note = 2'-fluoroadenosine
  modified_base 6: mod_base = OTHER; note = 2'-O-methyladenosine
  modified_base 7: mod_base = OTHER; note = 2'-fluorouridine
  modified_base 8: mod_base = OTHER; note = 2'-O-methyladenosine
  modified_base 9: mod_base = um
  modified_base 10: mod_base = cm
  modified_base 11: mod_base = cm
  modified_base 12: mod_base = um
  modified_base 13: mod_base = cm
  modified_base 14: mod_base = OTHER; note = 2'-fluorocytidine
  modified_base 15: mod_base = um
  modified_base 16: mod_base = OTHER; note = 2'-fluorocytidine
  modified_base 17: mod_base = cm
  modified_base 18: mod_base = OTHER; note = 2'-O-methyladenosine
  modified_base 19: mod_base = um
  modified_base 20: mod_base = cm
  modified_base 21: mod_base = OTHER; note = 2'-O-methyluridine with a 3'-phosphorothioate linkage
  modified_base 22: mod_base = OTHER; note = 2'-O-methylguanosine with a 3'-phosphorothioate linkage
  modified_base 23: mod_base = OTHER; note = 2'-O-methyladenosine
tcagaatatcctcctccatctga

SEQ ID NO: 300 - RNA, 23 nt, synthetic construct
  source 1..23: mol_type = other RNA
  modified_base 1: mod_base = OTHER; note = 2'-O-methyluridine with a 3'-phosphorothioate linkage
  modified_base 2: mod_base = OTHER; note = 2'-fluorocytidine with a 3'-phosphorothioate linkage
  modified_base 3: mod_base = gm
  modified_base 4: mod_base = cm
  modified_base 5: mod_base = OTHER; note = 2'-fluoroadenosine
  modified_base 6: mod_base = gm
  modified_base 7: mod_base = OTHER; note = 2'-fluorocytidine
  modified_base 8: mod_base = cm
  modified_base 9: mod_base = gm
  modified_base 10: mod_base = OTHER; note = 2'-O-methyladenosine
  modified_base 11: mod_base = um
  modified_base 12: mod_base = gm
  modified_base 13: mod_base = cm
  modified_base 14: mod_base = OTHER; note = 2'-fluorouridine
  modified_base 15: mod_base = gm
  modified_base 16: mod_base = OTHER; note = 2'-fluorocytidine
  modified_base 17: mod_base = um
  modified_base 18: mod_base = gm
  modified_base 19: mod_base = um
  modified_base 20: mod_base = gm
  modified_base 21: mod_base = OTHER; note = 2'-O-methylcytidine with a 3'-phosphorothioate linkage
  modified_base 22: mod_base = OTHER; note = 2'-O-methylcytidine with a 3'-phosphorothioate linkage
  modified_base 23: mod_base = OTHER; note = 2'-O-methyladenosine
tcgcagccgatgctgctgtgcca

SEQ ID NO: 301 - RNA, 23 nt, synthetic construct
  source 1..23: mol_type = other RNA
  modified_base 1: mod_base = OTHER; note = 2'-O-methyluridine with a 3'-phosphorothioate linkage
  modified_base 2: mod_base = OTHER; note = 2'-fluorouridine with a 3'-phosphorothioate linkage
  modified_base 3: mod_base = OTHER; note = 2'-O-methyladenosine
  modified_base 4: mod_base = gm
  modified_base 5: mod_base = OTHER; note = 2'-fluoroadenosine
  modified_base 6: mod_base = gm
  modified_base 7: mod_base = OTHER; note = 2'-fluoroadenosine
  modified_base 8: mod_base = cm
  modified_base 9: mod_base = cm
  modified_base 10: mod_base = cm
  modified_base 11: mod_base = OTHER; note = 2'-O-methyladenosine
  modified_base 12: mod_base = gm
  modified_base 13: mod_base = gm
  modified_base 14: mod_base = OTHER; note = 2'-fluorocytidine
  modified_base 15: mod_base = um
  modified_base 16: mod_base = OTHER; note = 2'-fluoroguanosine
  modified_base 17: mod_base = um
  modified_base 18: mod_base = um
  modified_base 19: mod_base = cm
  modified_base 20: mod_base = cm
  modified_base 21: mod_base = OTHER; note = 2'-O-methyluridine with a 3'-phosphorothioate linkage
  modified_base 22: mod_base = OTHER; note = 2'-O-methylguanosine with a 3'-phosphorothioate linkage
  modified_base 23: mod_base = gm
ttagagacccaggctgttcctgg

SEQ ID NO: 302 - RNA, 23 nt, synthetic construct
  source 1..23: mol_type = other RNA
  modified_base 1: mod_base = OTHER; note = 2'-O-methyluridine with a 3'-phosphorothioate linkage
  modified_base 2: mod_base = OTHER; note = 2'-fluoroguanosine with a 3'-phosphorothioate linkage
  modified_base 3: mod_base = cm
  modified_base 4: mod_base = um
  modified_base 5: mod_base = OTHER; note = 2'-fluoroguanosine
  modified_base 6: mod_base = cm
  modified_base 7: mod_base = OTHER; note = 2'-fluorouridine
  modified_base 8: mod_base = gm
  modified_base 9: mod_base = um
  modified_base 10: mod_base = gm
  modified_base 11: mod_base = cm
  modified_base 12: mod_base = cm
  modified_base 13: mod_base = OTHER; note = 2'-O-methyladenosine
  modified_base 14: mod_base = OTHER; note = 2'-fluorocytidine
  modified_base 15: mod_base = cm
  modified_base 16: mod_base = OTHER; note = 2'-fluoroadenosine
  modified_base 17: mod_base = um
  modified_base 18: mod_base = cm
  modified_base 19: mod_base = um
  modified_base 20: mod_base = cm
  modified_base 21: mod_base = OTHER; note = 2'-O-methylcytidine with a 3'-phosphorothioate linkage
  modified_base 22: mod_base = OTHER; note = 2'-O-methylcytidine with a 3'-phosphorothioate linkage
  modified_base 23: mod_base = gm
tgctgctgtgccaccatctcccg

SEQ ID NO: 303 - RNA, 23 nt, synthetic construct
  source 1..23: mol_type = other RNA
  modified_base 1: mod_base = OTHER; note = 2'-O-methyluridine with a 3'-phosphorothioate linkage
  modified_base 2: mod_base = OTHER; note = 2'-fluorouridine with a 3'-phosphorothioate linkage
  modified_base 3: mod_base = cm
  modified_base 4: mod_base = um
  modified_base 5: mod_base = OTHER; note = 2'-fluoroguanosine
  modified_base 6: mod_base = um
  modified_base 7: mod_base = OTHER; note = 2'-fluorocytidine
  modified_base 8: mod_base = gm
  modified_base 9: mod_base = cm
  modified_base 10: mod_base = OTHER; note = 2'-O-methyladenosine
  modified_base 11: mod_base = gm
  modified_base 12: mod_base = cm
  modified_base 13: mod_base = cm
  modified_base 14: mod_base = OTHER; note = 2'-fluoroguanosine
  modified_base 15: mod_base = OTHER; note = 2'-O-methyladenosine
  modified_base 16: mod_base = OTHER; note = 2'-fluorouridine
  modified_base 17: mod_base = gm
  modified_base 18: mod_base = cm
  modified_base 19: mod_base = um
  modified_base 20: mod_base = gm
  modified_base 21: mod_base = OTHER; note = 2'-O-methylcytidine with a 3'-phosphorothioate linkage
  modified_base 22: mod_base = OTHER; note = 2'-O-methyluridine with a 3'-phosphorothioate linkage
  modified_base 23: mod_base = gm
ttctgtcgcagccgatgctgctg

SEQ ID NO: 304 - RNA, 23 nt, synthetic construct
  source 1..23: mol_type = other RNA
  modified_base 1: mod_base = OTHER; note = 2'-O-methyluridine with a 3'-phosphorothioate linkage
  modified_base 2: mod_base = OTHER; note = 2'-fluoroadenosine with a 3'-phosphorothioate linkage
  modified_base 3: mod_base = gm
  modified_base 4: mod_base = cm
  modified_base 5: mod_base = OTHER; note = 2'-fluorocytidine
  modified_base 6: mod_base = um
  modified_base 7: mod_base = OTHER; note = 2'-fluorouridine
  modified_base 8: mod_base = um
  modified_base 9: mod_base = OTHER; note = 2'-O-methyladenosine
  modified_base 10: mod_base = OTHER; note = 2'-O-methyladenosine
  modified_base 11: mod_base = gm
  modified_base 12: mod_base = OTHER; note = 2'-O-methyladenosine
  modified_base 13: mod_base = cm
  modified_base 14: mod_base = OTHER; note = 2'-fluorocytidine
  modified_base 15: mod_base = um
  modified_base 16: mod_base = OTHER; note = 2'-fluorocytidine
  modified_base 17: mod_base = OTHER; note = 2'-O-methyladenosine
  modified_base 18: mod_base = OTHER; note = 2'-O-methyladenosine
  modified_base 19: mod_base = OTHER; note = 2'-O-methyladenosine
  modified_base 20: mod_base = um
  modified_base 21: mod_base = OTHER; note = 2'-O-methyluridine with a 3'-phosphorothioate linkage
  modified_base 22: mod_base = OTHER; note = 2'-O-methylcytidine with a 3'-phosphorothioate linkage
  modified_base 23: mod_base = um
tagcctttaagacctcaaattct

SEQ ID NO: 305 - RNA, 23 nt, synthetic construct
  source 1..23: mol_type = other RNA
  modified_base 1: mod_base = OTHER; note = 2'-O-methyluridine with a 3'-phosphorothioate linkage
  modified_base 2: mod_base = OTHER; note = 2'-fluoroguanosine with a 3'-phosphorothioate linkage
  modified_base 3: mod_base = gm
  modified_base 4: mod_base = cm
  modified_base 5: mod_base = OTHER; note = 2'-fluoroguanosine
  modified_base 6: mod_base = cm
  modified_base 7: mod_base = OTHER; note = 2'-fluorouridine
  modified_base 8: mod_base = cm
  modified_base 9: mod_base = cm
  modified_base 10: mod_base = um
  modified_base 11: mod_base = cm
  modified_base 12: mod_base = OTHER; note = 2'-O-methyladenosine
  modified_base 13: mod_base = gm
  modified_base 14: mod_base = OTHER; note = 2'-fluorocytidine
  modified_base 15: mod_base = um
  modified_base 16: mod_base = OTHER; note = 2'-fluoroguanosine
  modified_base 17: mod_base = gm
  modified_base 18: mod_base = OTHER; note = 2'-O-methyladenosine
  modified_base 19: mod_base = cm
  modified_base 20: mod_base = um
  modified_base 21: mod_base = OTHER; note = 2'-O-methyluridine with a 3'-phosphorothioate linkage
  modified_base 22: mod_base = OTHER; note = 2'-O-methylcytidine with a 3'-phosphorothioate linkage
  modified_base 23: mod_base = um
tggcgctcctcagctggacttct

SEQ ID NO: 306 - RNA, 23 nt, synthetic construct
  source 1..23: mol_type = other RNA
  modified_base 1: mod_base = OTHER; note = 2'-O-methyluridine with a 3'-phosphorothioate linkage
  modified_base 2: mod_base = OTHER; note = 2'-fluoroguanosine with a 3'-phosphorothioate linkage
  modified_base 3: mod_base = cm
  modified_base 4: mod_base = gm
  modified_base 5: mod_base = OTHER; note = 2'-fluorouridine
  modified_base 6: mod_base = gm
  modified_base 7: mod_base = OTHER; note = 2'-fluoroadenosine
  modified_base 8: mod_base = gm
  modified_base 9: mod_base = cm
  modified_base 10: mod_base = cm
  modified_base 11: mod_base = um
  modified_base 12: mod_base = um
  modified_base 13: mod_base = um
  modified_base 14: mod_base = OTHER; note = 2'-fluoroadenosine
  modified_base 15: mod_base = OTHER; note = 2'-O-methyladenosine
  modified_base 16: mod_base = OTHER; note = 2'-fluoroguanosine
  modified_base 17: mod_base = OTHER; note = 2'-O-methyladenosine
  modified_base 18: mod_base = cm
  modified_base 19: mod_base = cm
  modified_base 20: mod_base = um
  modified_base 21: mod_base = OTHER; note = 2'-O-methylcytidine with a 3'-phosphorothioate linkage
  modified_base 22: mod_base = OTHER; note = 2'-O-methyladenosine with a 3'-phosphorothioate linkage
  modified_base 23: mod_base = OTHER; note = 2'-O-methyladenosine
tgcgtgagcctttaagacctcaa

SEQ ID NO: 307 - RNA, 21 nt, synthetic construct
  source 1..21: mol_type = other RNA
tcgggcaagcctgttggagaa

SEQ ID NO: 308 - RNA, 21 nt, synthetic construct
  source 1..21: mol_type = other RNA
aatctgcctggatggaactga

SEQ ID NO: 309 - RNA, 21 nt, synthetic construct
  source 1..21: mol_type = other RNA
cctggatggaactgaggacca

SEQ ID NO: 310 - RNA, 21 nt, synthetic construct
  source 1..21: mol_type = other RNA
ttaaagcagagtcgtggcata

SEQ ID NO: 311 - RNA, 21 nt, synthetic construct
  source 1..21: mol_type = other RNA
tgcgacagatccaggagagaa

SEQ ID NO: 312 - RNA, 21 nt, synthetic construct
  source 1..21: mol_type = other RNA
tgaatctgcctggatggaaca

SEQ ID NO: 313 - RNA, 21 nt, synthetic construct
  source 1..21: mol_type = other RNA
gagctgcctgttcactgggaa

SEQ ID NO: 314 - RNA, 21 nt, synthetic construct
  source 1..21: mol_type = other RNA
aggtcttaaaggctcacgcta

SEQ ID NO: 315 - RNA, 21 nt, synthetic construct
  source 1..21: mol_type = other RNA
tcactgggatcagccagggca

SEQ ID NO: 316 - RNA, 21 nt, synthetic construct
  source 1..21: mol_type = other RNA
tcattaaagcagagtcgtgga

SEQ ID NO: 317 - RNA, 21 nt, synthetic construct
  source 1..21: mol_type = other RNA
gaacagcctgggtctctatga

SEQ ID NO: 318 - RNA, 21 nt, synthetic construct
  source 1..21: mol_type = other RNA
ggggcaggaggtcagccggga

SEQ ID NO: 319 - RNA, 21 nt, synthetic construct
  source 1..21: mol_type = other RNA
agcggctagaagtccagctga

SEQ ID NO: 320 - RNA, 21 nt, synthetic construct
  source 1..21: mol_type = other RNA
gagatggtggcacagcagcaa

SEQ ID NO: 321 - RNA, 21 nt, synthetic construct
  source 1..21: mol_type = other RNA
ggctgacaaaggccaggaaca

SEQ ID NO: 322 - RNA, 21 nt, synthetic construct
  source 1..21: mol_type = other RNA
gtccagctgaggagcgcctga

SEQ ID NO: 323 - RNA, 21 nt, synthetic construct
  source 1..21: mol_type = other RNA
cattaaagcagagtcgtggca

SEQ ID NO: 324 - RNA, 21 nt, synthetic construct
  source 1..21: mol_type = other RNA
tcccagcctgaatctgcctga

SEQ ID NO: 325 - RNA, 21 nt, synthetic construct
  source 1..21: mol_type = other RNA
ggatgcagcccaggaacttca

SEQ ID NO: 326 - RNA, 21 nt, synthetic construct
  source 1..21: mol_type = other RNA
gctagaagtccagctgaggaa

SEQ ID NO: 327 - RNA, 21 nt, synthetic construct
  source 1..21: mol_type = other RNA
cacagcagcatcggctgcgaa

SEQ ID NO: 328 - RNA, 21 nt, synthetic construct
  source 1..21: mol_type = other RNA
ggaacttcgggcaagcctgta

SEQ ID NO: 329 - RNA, 21 nt, synthetic construct
  source 1..21: mol_type = other RNA
actgggatcagccagggcgca

SEQ ID NO: 330 - RNA, 21 nt, synthetic construct
  source 1..21: mol_type = other RNA
agaagtccagctgaggagcga

SEQ ID NO: 331 - RNA, 21 nt, synthetic construct
  source 1..21: mol_type = other RNA
gcatcggctgcgacagatcca

SEQ ID NO: 332 - RNA, 21 nt, synthetic construct
  source 1..21: mol_type = other RNA
agatggtggcacagcagcata

SEQ ID NO: 333 - RNA, 21 nt, synthetic construct
  source 1..21: mol_type = other RNA
ggtggcacagcagcatcggca

SEQ ID NO: 334 - RNA, 21 nt, synthetic construct
  source 1..21: mol_type = other RNA
acagcagcatcggctgcgaca

SEQ ID NO: 335 - RNA, 21 nt, synthetic construct
  source 1..21: mol_type = other RNA
aaggctcacgctgacaagcaa

SEQ ID NO: 336 - RNA, 21 nt, synthetic construct
  source 1..21: mol_type = other RNA
agcctgaatctgcctggatga

SEQ ID NO: 337 - RNA, 21 nt, synthetic construct
  source 1..21: mol_type = other RNA
atcggctgcgacagatccaga

SEQ ID NO: 338 - RNA, 21 nt, synthetic construct
  source 1..21: mol_type = other RNA
agtccagctgaggagcgccta

SEQ ID NO: 339 - RNA, 21 nt, synthetic construct
  source 1..21: mol_type = other RNA
cggcagaggcgggagatggta

SEQ ID NO: 340 - RNA, 21 nt, synthetic construct
  source 1..21: mol_type = other RNA
atgctgcaaggaacacttcca

SEQ ID NO: 341 - RNA, 21 nt, synthetic construct
  source 1..21: mol_type = other RNA
cttcgggcaagcctgttggaa

SEQ ID NO: 342 - RNA, 21 nt, synthetic construct
  source 1..21: mol_type = other RNA
ggagctgcctgttcactggga

SEQ ID NO: 343 - RNA, 21 nt, synthetic construct
  source 1..21: mol_type = other RNA
gcctggatggaactgaggaca

SEQ ID NO: 344 - RNA, 21 nt, synthetic construct
  source 1..21: mol_type = other RNA
caaggaacacttccacgccca

SEQ ID NO: 345 - RNA, 21 nt, synthetic construct
  source 1..21: mol_type = other RNA
ggctagaagtccagctgagga

SEQ ID NO: 346 - RNA, 21 nt, synthetic construct
  source 1..21: mol_type = other RNA
tgaggtcttaaaggctcacga

SEQ ID NO: 347 - RNA, 21 nt, synthetic construct
  source 1..21: mol_type = other RNA
gggcaagcctgttggagacta

SEQ ID NO: 348 - RNA, 21 nt, synthetic construct
  source 1..21: mol_type = other RNA
gcggctagaagtccagctgaa

SEQ ID NO: 349 - RNA, 21 nt, synthetic construct
  source 1..21: mol_type = other RNA
tggcacagcagcatcggctga

SEQ ID NO: 350 - RNA, 21 nt, synthetic construct
  source 1..21: mol_type = other RNA
atggtggcacagcagcatcga

SEQ ID NO: 351 - RNA, 21 nt, synthetic construct
  source 1..21: mol_type = other RNA
agaatttgaggtcttaaagga

SEQ ID NO: 352 - RNA, 21 nt, synthetic construct
  source 1..21: mol_type = other RNA
ggaacagcctgggtctctata

SEQ ID NO: 353 - RNA, 21 nt, synthetic construct
  source 1..21: mol_type = other RNA
aggctcacgctgacaagcaga

SEQ ID NO: 354 - RNA, 21 nt, synthetic construct
  source 1..21: mol_type = other RNA
ggcacagcagcatcggctgca

SEQ ID NO: 355 - RNA, 21 nt, synthetic construct
  source 1..21: mol_type = other RNA
cgggcaagcctgttggagaca

SEQ ID NO: 356 - RNA, 21 nt, synthetic construct
  source 1..21: mol_type = other RNA
aaaggctcacgctgacaagca

SEQ ID NO: 357 - RNA, 21 nt, synthetic construct
  source 1..21: mol_type = other RNA
gaatctgcctggatggaacta

SEQ ID NO: 358 - RNA, 21 nt, synthetic construct
  source 1..21: mol_type = other RNA
cctgttcactgggatcagcca

SEQ ID NO: 359 - RNA, 21 nt, synthetic construct
  source 1..21: mol_type = other RNA
attaaagcagagtcgtggcaa

SEQ ID NO: 360 - RNA, 21 nt, synthetic construct
  source 1..21: mol_type = other RNA
tggtggcacagcagcatcgga

SEQ ID NO: 361 - RNA, 21 nt, synthetic construct
  source 1..21: mol_type = other RNA
aggaggatattctgcagctga

SEQ ID NO: 362 - RNA, 21 nt, synthetic construct
  source 1..21: mol_type = other RNA
ttgaggtcttaaaggctcaca

SEQ ID NO: 363 - RNA, 21 nt, synthetic construct
  source 1..21: mol_type = other RNA
gcccaggaacttcgggcaaga

SEQ ID NO: 364 - RNA, 21 nt, synthetic construct
  source 1..21: mol_type = other RNA
tagaagtccagctgaggagca

SEQ ID NO: 365 - RNA, 21 nt, synthetic construct
  source 1..21: mol_type = other RNA
ctgcctgttcactgggatcaa

SEQ ID NO: 366 - RNA, 21 nt, synthetic construct
  source 1..21: mol_type = other RNA
tctgcctggatggaactgaga

SEQ ID NO: 367 - RNA, 21 nt, synthetic construct
  source 1..21: mol_type = other RNA
cacgctgacaagcagagccaa

SEQ ID NO: 368 - RNA, 21 nt, synthetic construct
  source 1..21: mol_type = other RNA
tgcctggatggaactgaggaa

SEQ ID NO: 369 - RNA, 21 nt, synthetic construct
  source 1..21: mol_type = other RNA
gatggtggcacagcagcatca

SEQ ID NO: 370 - RNA, 21 nt, synthetic construct
  source 1..21: mol_type = other RNA
gtcttaaaggctcacgctgaa

SEQ ID NO: 371 - RNA, 21 nt, synthetic construct
  source 1..21: mol_type = other RNA
gatgcagcccaggaacttcga

SEQ ID NO: 372 - RNA, 21 nt, synthetic construct
  source 1..21: mol_type = other RNA
gagaatttgaggtcttaaaga

SEQ ID NO: 373 - RNA, 21 nt, synthetic construct
  source 1..21: mol_type = other RNA
gatggaggaggatattctgca

SEQ ID NO: 374 - RNA, 21 nt, synthetic construct
  source 1..21: mol_type = other RNA
tgacaaaggccaggaacagca

SEQ ID NO: 375 - RNA, 21 nt, synthetic construct
  source 1..21: mol_type = other RNA
ctcacgctgacaagcagagca

SEQ ID NO: 376 - RNA, 21 nt, synthetic construct
  source 1..21: mol_type = other RNA
gcctgaatctgcctggatgga

SEQ ID NO: 377 - RNA, 21 nt, synthetic construct
  source 1..21: mol_type = other RNA
acagcctgggtctctatggca

SEQ ID NO: 378 - RNA, 21 nt, synthetic construct
  source 1..21: mol_type = other RNA
caggaacttcgggcaagccta

SEQ ID NO: 379 - RNA, 21 nt, synthetic construct
  source 1..21: mol_type = other RNA
gcaaggaacacttccacgcca

SEQ ID NO: 380 - RNA, 21 nt, synthetic construct
  source 1..21: mol_type = other RNA
tttgaggtcttaaaggctcaa

SEQ ID NO: 381 - RNA, 21 nt, synthetic construct
  source 1..21: mol_type = other RNA
ggcccaggcacagaaggtgca

SEQ ID NO: 382 - RNA, 21 nt, synthetic construct
  source 1..21: mol_type = other RNA
tcagatggaggaggatattca

SEQ ID NO: 383 - RNA, 21 nt, synthetic construct
  source 1..21: mol_type = other RNA
ccaggaacttcgggcaagcca

SEQ ID NO: 384 - RNA, 21 nt, synthetic construct
  source 1..21: mol_type = other RNA
cagcccaggaacttcgggcaa

SEQ ID NO: 385 - RNA, 21 nt, synthetic construct
  source 1..21: mol_type = other RNA
cccagcctgaatctgcctgga

SEQ ID NO: 386 - RNA, 21 nt, synthetic construct
  source 1..21: mol_type = other RNA
cccaggaacttcgggcaagca

SEQ ID NO: 387 - RNA, 21 nt, synthetic construct
  source 1..21: mol_type = other RNA
catcggctgcgacagatccaa

SEQ ID NO: 388 - RNA, 21 nt, synthetic construct
  source 1..21: mol_type = other RNA
gtggcacagcagcatcggcta

SEQ ID NO: 389 - RNA, 21 nt, synthetic construct
  source 1..21: mol_type = other RNA
ggccctcacaggccacgtgca

SEQ ID NO: 390 - RNA, 21 nt, synthetic construct
  source 1..21: mol_type = other RNA
aacttcgggcaagcctgttga

SEQ ID NO: 391 - RNA, 21 nt, synthetic construct
  source 1..21: mol_type = other RNA
taaaggctcacgctgacaaga

SEQ ID NO: 392 - RNA, 21 nt, synthetic construct
  source 1..21: mol_type = other RNA
ttcgggcaagcctgttggaga

SEQ ID NO: 393 - RNA, 21 nt, synthetic construct
  source 1..21: mol_type = other RNA
agcatcggctgcgacagatca

SEQ ID NO: 394 - RNA, 21 nt, synthetic construct
  source 1..21: mol_type = other RNA
atctgcctggatggaactgaa

SEQ ID NO: 395 - RNA, 21 nt, synthetic construct
  source 1..21: mol_type = other RNA
gctcacgctgacaagcagaga

SEQ ID NO: 396 - RNA, 21 nt, synthetic construct
  source 1..21: mol_type = other RNA
agatggaggaggatattctga

SEQ ID NO: 397 - RNA, 21 nt, synthetic construct
  source 1..21: mol_type = other RNA
gcacagcagcatcggctgcga

SEQ ID NO: 398 - RNA, 21 nt, synthetic construct
  source 1..21: mol_type = other RNA
aggaacagcctgggtctctaa

SEQ ID NO: 399 - RNA, 21 nt, synthetic construct
  source 1..21: mol_type = other RNA
ggagatggtggcacagcagca

SEQ ID NO: 400 - RNA, 21 nt, synthetic construct
  source 1..21: mol_type = other RNA
gcagcatcggctgcgacagaa

SEQ ID NO: 401 - RNA, 21 nt, synthetic construct
  source 1..21: mol_type = other RNA
aatttgaggtcttaaaggcta

SEQ ID NO: 402 - RNA, 21 nt, synthetic construct
  source 1..21: mol_type = other RNA
aagtccagctgaggagcgcca

SEQ ID NO: 403 - RNA, 21 nt, synthetic construct
  source 1..21: mol_type = other RNA
gaggtcttaaaggctcacgca

SEQ ID NO: 404 - RNA, 21 nt, synthetic construct
  source 1..21: mol_type = other RNA
agcagcatcggctgcgacaga

SEQ ID NO: 405 - RNA, 21 nt, synthetic construct
  source 1..21: mol_type = other RNA
ggagctgaccctgctcttcca

SEQ ID NO: 406 - RNA, 21 nt, synthetic construct
  source 1..21: mol_type = other RNA
gactcagatggaggaggatat

SEQ ID NO: 407 - RNA, 21 nt, synthetic construct
  source 1..21: mol_type = other RNA
cttaaaggctcacgctgacaa

SEQ ID NO: 408 - RNA, 21 nt, synthetic construct
  source 1..21: mol_type = other RNA
aagcctgttggagactcagat

SEQ ID NO: 409 - RNA, 23 nt, synthetic construct
  source 1..23: mol_type = other RNA
ttctccaacaggcttgcccgaag

SEQ ID NO: 410 - RNA, 23 nt, synthetic construct
  source 1..23: mol_type = other RNA
tcagttccatccaggcagattca

SEQ ID NO: 411 - RNA, 23 nt, synthetic construct
  source 1..23: mol_type = other RNA
tggtcctcagttccatccaggca

SEQ ID NO: 412 - RNA, 23 nt, synthetic construct
  source 1..23: mol_type = other RNA
tatgccacgactctgctttaatg

SEQ ID NO: 413 - RNA, 23 nt, synthetic construct
  source 1..23: mol_type = other RNA
ttctctcctggatctgtcgcagc

SEQ ID NO: 414 - RNA, 23 nt, synthetic construct
  source 1..23: mol_type = other RNA
tgttccatccaggcagattcagg

SEQ ID NO: 415 - RNA, 23 nt, synthetic construct
  source 1..23: mol_type = other RNA
ttcccagtgaacaggcagctcct

SEQ ID NO: 416 - RNA, 23 nt, synthetic construct
  source 1..23: mol_type = other RNA
tagcgtgagcctttaagacctca

SEQ ID NO: 417 - RNA, 23 nt, synthetic construct
  source 1..23: mol_type = other RNA
tgccctggctgatcccagtgaac

SEQ ID NO: 418 - RNA, 23 nt, synthetic construct
  source 1..23: mol_type = other RNA
tccacgactctgctttaatgagg

SEQ ID NO: 419 - RNA, 23 nt, synthetic construct
  source 1..23: mol_type = other RNA
tcatagagacccaggctgttcct

SEQ ID NO: 420 - RNA, 23 nt, synthetic construct
  source 1..23: mol_type = other RNA
tcccggctgacctcctgccccag

SEQ ID NO: 421 - RNA, 23 nt, synthetic construct
  source 1..23: mol_type = other RNA
tcagctggacttctagccgctgc

SEQ ID NO: 422 - RNA, 23 nt, synthetic construct
  source 1..23: mol_type = other RNA
ttgctgctgtgccaccatctccc

SEQ ID NO: 423 - RNA, 23 nt, synthetic construct
  source 1..23: mol_type = other RNA
tgttcctggcctttgtcagccgt

SEQ ID NO: 424 - RNA, 23 nt, synthetic construct
  source 1..23: mol_type = other RNA
tcaggcgctcctcagctggactt

SEQ ID NO: 425 - RNA, 23 nt, synthetic construct
  source 1..23: mol_type = other RNA
tgccacgactctgctttaatgag

SEQ ID NO: 426 - RNA, 23 nt, synthetic construct
  source 1..23: mol_type = other RNA
tcaggcagattcaggctgggagc

SEQ ID NO: 427 - RNA, 23 nt, synthetic construct
  source 1..23: mol_type = other RNA
tgaagttcctgggctgcatcccg

SEQ ID NO: 428 - RNA, 23 nt, synthetic construct
  source 1..23: mol_type = other RNA
ttcctcagctggacttctagccg

SEQ ID NO: 429 - RNA, 23 nt, synthetic construct
  source 1..23: mol_type = other RNA
ttcgcagccgatgctgctgtgcc

SEQ ID NO: 430 - RNA, 23 nt, synthetic construct
  source 1..23: mol_type = other RNA
tacaggcttgcccgaagttcctg

SEQ ID NO: 431 - RNA, 23 nt, synthetic construct
  source 1..23: mol_type = other RNA
tgcgccctggctgatcccagtga

SEQ ID NO: 432 - RNA, 23 nt, synthetic construct
  source 1..23: mol_type = other RNA
tcgctcctcagctggacttctag

SEQ ID NO: 433 - RNA, 23 nt, synthetic construct
  source 1..23: mol_type = other RNA
tggatctgtcgcagccgatgctg

SEQ ID NO: 434 - RNA, 23 nt, synthetic construct
  source 1..23: mol_type = other RNA
tatgctgctgtgccaccatctcc

SEQ ID NO: 435 - RNA, 23 nt, synthetic construct
  source 1..23: mol_type = other RNA
tgccgatgctgctgtgccaccat

SEQ ID NO: 436 - RNA, 23 nt, synthetic construct
  source 1..23: mol_type = other RNA
tgtcgcagccgatgctgctgtgc

SEQ ID NO: 437 - RNA, 23 nt, synthetic construct
  source 1..23: mol_type = other RNA
ttgcttgtcagcgtgagccttta

SEQ ID NO: 438 - RNA, 23 nt, synthetic construct
  source 1..23: mol_type = other RNA
tcatccaggcagattcaggctgg

SEQ ID NO: 439 - RNA, 23 nt, synthetic construct
  source 1..23: mol_type = other RNA
tctggatctgtcgcagccgatgc

SEQ ID NO: 440 - RNA, 23 nt, synthetic construct
  source 1..23: mol_type = other RNA
taggcgctcctcagctggacttc

SEQ ID NO: 441 - RNA, 23 nt, synthetic construct
  source 1..23: mol_type = other RNA
taccatctcccgcctctgccgct

SEQ ID NO: 442 - RNA, 23 nt, synthetic construct
  source 1..23: mol_type = other RNA
tggaagtgttccttgcagcatga

SEQ ID NO: 443 - RNA, 23 nt, synthetic construct
  source 1..23: mol_type = other RNA
ttccaacaggcttgcccgaagtt

SEQ ID NO: 444 - RNA, 23 nt, synthetic construct
  source 1..23: mol_type = other RNA
tcccagtgaacaggcagctcctc

SEQ ID NO: 445 - RNA, 23 nt, synthetic construct
  source 1..23: mol_type = other RNA
tgtcctcagttccatccaggcag

SEQ ID NO: 446 - RNA, 23 nt, synthetic construct
  source 1..23: mol_type = other RNA
tgggcgtggaagtgttccttgca

SEQ ID NO: 447 - RNA, 23 nt, synthetic construct
  source 1..23: mol_type = other RNA
tcctcagctggacttctagccgc

SEQ ID NO: 448 - RNA, 23 nt, synthetic construct
  source 1..23: mol_type = other RNA
tcgtgagcctttaagacctcaaa

SEQ ID NO: 449 - RNA, 23 nt, synthetic construct
  source 1..23: mol_type = other RNA
tagtctccaacaggcttgcccga

SEQ ID NO: 450 - RNA, 23 nt, synthetic construct
  source 1..23: mol_type = other RNA
ttcagctggacttctagccgctg

SEQ ID NO: 451 - RNA, 23 nt, synthetic construct
  source 1..23: mol_type = other RNA
tcagccgatgctgctgtgccacc

SEQ ID NO: 452 - RNA, 23 nt, synthetic construct
  source 1..23: mol_type = other RNA
tcgatgctgctgtgccaccatct

SEQ ID NO: 453 - RNA, 23 nt, synthetic construct
  source 1..23: mol_type = other RNA
tcctttaagacctcaaattctcg

SEQ ID NO: 454 - RNA, 23 nt, synthetic construct
  source 1..23: mol_type = other RNA
tatagagacccaggctgttcctg

SEQ ID NO: 455 - RNA, 23 nt, synthetic construct
  source 1..23: mol_type = other RNA
tctgcttgtcagcgtgagccttt

SEQ ID NO: 456 - RNA, 23 nt, synthetic construct
  source 1..23: mol_type = other RNA
tgcagccgatgctgctgtgccac

SEQ ID NO: 457 - RNA, 23 nt, synthetic construct
  source 1..23: mol_type = other RNA
tgtctccaacaggcttgcccgaa

SEQ ID NO: 458 - RNA, 23 nt, synthetic construct
  source 1..23: mol_type = other RNA
tgcttgtcagcgtgagcctttaa

SEQ ID NO: 459 - RNA, 23 nt, synthetic construct
  source 1..23: mol_type = other RNA
tagttccatccaggcagattcag

SEQ ID NO: 460 - RNA, 23 nt, synthetic construct
  source 1..23: mol_type = other RNA
tggctgatcccagtgaacaggca

SEQ ID NO: 461 - RNA, 23 nt, synthetic construct
  source 1..23: mol_type = other RNA
ttgccacgactctgctttaatga

SEQ ID NO: 462 - RNA, 23 nt, synthetic construct
  source 1..23: mol_type = other RNA
tccgatgctgctgtgccaccatc

SEQ ID NO: 463 - RNA, 23 nt, synthetic construct
  source 1..23: mol_type = other RNA
tcagctgcagaatatcctcctcc

SEQ ID NO: 464 - RNA, 23 nt, synthetic construct
  source 1..23: mol_type = other RNA
tgtgagcctttaagacctcaaat

SEQ ID NO: 465 - RNA, 23 nt, synthetic construct
  source 1..23: mol_type = other RNA
tcttgcccgaagttcctgggctg

SEQ ID NO: 466 - RNA, 23 nt, synthetic construct
  source 1..23: mol_type = other RNA
tgctcctcagctggacttctagc

SEQ ID NO: 467 - RNA, 23 nt, synthetic construct
  source 1..23: mol_type = other RNA
ttgatcccagtgaacaggcagct

SEQ ID NO: 468 - RNA, 23 nt, synthetic construct
  source 1..23: mol_type = other RNA
tctcagttccatccaggcagatt

SEQ ID NO: 469 - RNA, 23 nt, synthetic construct
  source 1..23: mol_type = other RNA
ttggctctgcttgtcagcgtgag

SEQ ID NO: 470 - RNA, 23 nt, synthetic construct
  source 1..23: mol_type = other RNA
ttcctcagttccatccaggcaga

SEQ ID NO: 471 - RNA, 23 nt, synthetic construct
  source 1..23: mol_type = other RNA
tgatgctgctgtgccaccatctc

SEQ ID NO: 472 - RNA, 23 nt, synthetic construct
  source 1..23: mol_type = other RNA
ttcagcgtgagcctttaagacct

SEQ ID NO: 473 - RNA, 23 nt, synthetic construct
  source 1..23: mol_type = other RNA
tcgaagttcctgggctgcatccc

SEQ ID NO: 474 - RNA, 23 nt, synthetic construct
  source 1..23: mol_type = other RNA
tctttaagacctcaaattctcgg

SEQ ID NO: 475 - RNA, 23 nt, synthetic construct
  source 1..23: mol_type = other RNA
tgcagaatatcctcctccatctg

SEQ ID NO: 476 - RNA, 23 nt, synthetic construct
  source 1..23: mol_type = other RNA
tgctgttcctggcctttgtcagc

SEQ ID NO: 477 - RNA, 23 nt, synthetic construct
  source 1..23: mol_type = other RNA
tgctctgcttgtcagcgtgagcc

SEQ ID NO: 478 - RNA, 23 nt, synthetic construct
  source 1..23: mol_type = other RNA
tccatccaggcagattcaggctg

SEQ ID NO: 479 - RNA, 23 nt, synthetic construct
  source 1..23: mol_type = other RNA
tgccatagagacccaggctgttc

SEQ ID NO: 480 - RNA, 23 nt, synthetic construct
  source 1..23: mol_type = other RNA
taggcttgcccgaagttcctggg

SEQ ID NO: 481 - RNA, 23 nt, synthetic construct
  source 1..23: mol_type = other RNA
tggcgtggaagtgttccttgcag

SEQ ID NO: 482 - RNA, 23 nt, synthetic construct
  source 1..23: mol_type = other RNA
ttgagcctttaagacctcaaatt

SEQ ID NO: 483 - RNA, 23 nt, synthetic construct
  source 1..23: mol_type = other RNA
tgcaccttctgtgcctgggccac

SEQ ID NO: 484 - RNA, 23 nt, synthetic construct
  source 1..23: mol_type = other RNA
tgaatatcctcctccatctgagt

SEQ ID NO: 485 - RNA, 23 nt, synthetic construct
  source 1..23: mol_type = other RNA
tggcttgcccgaagttcctgggc

SEQ ID NO: 486 - RNA, 23 nt, synthetic construct
  source 1..23: mol_type = other RNA
ttgcccgaagttcctgggctgca

SEQ ID NO: 487 - RNA, 23 nt, synthetic construct
  source 1..23: mol_type = other RNA
tccaggcagattcaggctgggag

SEQ ID NO: 488 - RNA, 23 nt, synthetic construct
  source 1..23: mol_type = other RNA
tgcttgcccgaagttcctgggct

SEQ ID NO: 489 - RNA, 23 nt, synthetic construct
  source 1..23: mol_type = other RNA
ttggatctgtcgcagccgatgct

SEQ ID NO: 490 - RNA, 23 nt, synthetic construct
  source 1..23: mol_type = other RNA
tagccgatgctgctgtgccacca

SEQ ID NO: 491 - RNA, 23 nt, synthetic construct
  source 1..23: mol_type = other RNA
tgcacgtggcctgtgagggccca

SEQ ID NO: 492 - RNA, 23 nt, synthetic construct
  source 1..23: mol_type = other RNA
tcaacaggcttgcccgaagttcc

SEQ ID NO: 493 - RNA, 23 nt, synthetic construct
  source 1..23: mol_type = other RNA
tcttgtcagcgtgagcctttaag

SEQ ID NO: 494 - RNA, 23 nt, synthetic construct
  source 1..23: mol_type = other RNA
tctccaacaggcttgcccgaagt

SEQ ID NO: 495 - RNA, 23 nt, synthetic construct
  source 1..23: mol_type = other RNA
tgatctgtcgcagccgatgctgc

SEQ ID NO: 496 - RNA, 23 nt, synthetic construct
  source 1..23: mol_type = other RNA
ttcagttccatccaggcagattc

SEQ ID NO: 497 - RNA, 23 nt, synthetic construct
  source 1..23: mol_type = other RNA
tctctgcttgtcagcgtgagcct

SEQ ID NO: 498 - RNA, 23 nt, synthetic construct
  source 1..23: mol_type = other RNA
tcagaatatcctcctccatctga

SEQ ID NO: 499 - RNA, 23 nt, synthetic construct
  source 1..23: mol_type = other RNA
tcgcagccgatgctgctgtgcca

SEQ ID NO: 500 - RNA, 23 nt, synthetic construct
  source 1..23: mol_type = other RNA
ttagagacccaggctgttcctgg

SEQ ID NO: 501 - RNA, 23 nt, synthetic construct
  source 1..23: mol_type = other RNA
tgctgctgtgccaccatctcccg

SEQ ID NO: 502 - RNA, 23 nt, synthetic construct
  source 1..23: mol_type = other RNA
ttctgtcgcagccgatgctgctg

SEQ ID NO: 503 - RNA, 23 nt, synthetic construct
  source 1..23: mol_type = other RNA
tagcctttaagacctcaaattct

SEQ ID NO: 504 - RNA, 23 nt, synthetic construct
  source 1..23: mol_type = other RNA
tggcgctcctcagctggacttct

SEQ ID NO: 505 - RNA, 23 nt, synthetic construct
  source 1..23: mol_type = other RNA
tgcgtgagcctttaagacctcaa

SEQ ID NO: 506 - RNA, 23 nt, synthetic construct
  source 1..23: mol_type = other RNA
tctgtcgcagccgatgctgctgt

SEQ ID NO: 507 - RNA, 23 nt, synthetic construct
  source 1..23: mol_type = other RNA
tggaagagcagggtcagctcctc

SEQ ID NO: 508 - RNA, 23 nt, synthetic construct
  source 1..23: mol_type = other RNA
atatcctcctccatctgagtctc

SEQ ID NO: 509 - RNA, 23 nt, synthetic construct
  source 1..23: mol_type = other RNA
ttgtcagcgtgagcctttaagac

SEQ ID NO: 510 - RNA, 23 nt, synthetic construct
  source 1..23: mol_type = other RNA
atctgagtctccaacaggcttgc

SEQ ID NO: 511 - DNA, 872 bp, Homo sapiens
  source 1..872: mol_type = genomic DNA
ataccttagaccctcagtcatgccagtgcctgctctgtgcctgctctgggccctggcaatggtgacccggcctgcctcagcggcccccatgggcggcccagaactggcacagcatgaggagctgaccctgctcttccatgggaccctgcagctgggccaggccctcaacggtgtgtacaggaccacggagggacggctgacaaaggccaggaacagcctgggtctctatggccgcacaatagaactcctggggcaggaggtcagccggggccgggatgcagcccaggaacttcgggcaagcctgttggagactcagatggaggaggatattctgcagctgcaggcagaggccacagctgaggtgctgggggaggtggcccaggcacagaaggtgctacgggacagcgtgcagcggctagaagtccagctgaggagcgcctggctgggccctgcctaccgagaatttgaggtcttaaaggctcacgctgacaagcagagccacatcctatgggccctcacaggccacgtgcagcggcagaggcgggagatggtggcacagcagcatcggctgcgacagatccaggagagactccacacagcggcgctcccagcctgaatctgcctggatggaactgaggaccaatcatgctgcaaggaacacttccacgccccgtgaggcccctgtgcagggaggagctgcctgttcactgggatcagccagggcgccgggccccacttctgagcacagagcagagacagacgcaggcggggacaaaggcagaggatgtagccccattggggaggggtggaggaaggacatgtaccctttcatgcctacacacccctcattaaagcagagtcgtggcatctca
